(19) United States
(12) Patent Application Publication
(10) Pub. No.: US 2005/0272089 A1
(43) Pub. Date: Dec. 8, 2005

(54) Critical genes and polypeptides of haemophilus influenzae and methods of use

(76) Inventors: John E. Mott, Kalamazoo, MI (US); Catherine M. Trepod, Portage, MI (US); Staffan Arvidson, Akersberga (SE)

Correspondence Address: MUETING, RAASCH & GEBHARDT, P.A., P.O. BOX 581415, MINNEAPOLIS, MN, 55458, US

(21) Appl. No.: 11/194,246

(22) Filed: Aug. 1, 2005

Related U.S. Application Data
(62) Division of application No. 10/274,586, filed on Oct. 21, 2002, now abandoned.
(60) Provisional application No. 60/345,438, filed on Oct. 19, 2001.

(51) Int. Cl. C12Q 1/68; G01N 33/554; G01N 33/569; C07H 21/04; C12N 1/20; C07K 14/195

(52) U.S. Cl. 435/6; 435/69.1; 435/252.3; 435/7.32; 530/350; 536/23.7

(57) ABSTRACT

The present invention provides methods of identifying agents that bind polypeptides critical for the survival of Haemophilus spp., preferably H. influenzae. The present invention also provides critical polypeptides and the polynucleotides encoding the critical polypeptides.

### CONTINUING APPLICATION DATA

[0001] This application claims the benefit of U.S. Provisional Application Ser. No. 60/345,438, filed Oct. 19, 2001, which is incorporated by reference herein.

### BACKGROUND

[0002] The increasing presence of antibiotic resistant bacteria in the clinical setting has renewed interest within the pharmaceutical industry for the development of new classes of antimicrobial agents. One strategy for the identification of potential new antibiotics is to develop molecular screens against novel antibacterial targets that are essential for the survival of the bacterium. Essential gene products traditionally have been identified through the isolation of conditional lethal mutants or the directed deletion of the target gene in the presence of a complementation vector. However these approaches are time consuming, laborious, and limited to bacteria with well defined genetic systems. The complete sequence analysis of many microbial genomes has led to the development of in vitro transposon mutagenesis as a more rapid method for identifying essential genes in bacteria. Transposon mutagenesis results in the disruption of the gene into which the transposon has inserted. Following recombination into the host chromosome, if the insertion allows the bacteria to survive and form colonies then it is unlikely that the gene is essential for bacterial viability under those conditions.

[0003] Haemophilus influenzae is a small, gram-negative, facultative anaerobic bacilli that frequently resides in the human upper respiratory tract. Infection by H. influenzae occurs most commonly in children, where it causes meningitis, sepsis, epiglotlitis, pneumonia, sinusitis, and where it is isolated in up to 25% of cases of otitis media. H. influenzae infection occurs in adults, typically those compromised by other conditions including diabetes and AIDS.

[0004] In the past, antibiotics were often effective to treat H. influenzae infections; however, antibiotic resistant strains have become prevalent. Thus, there continues to exist a need for new agents useful for treating bacterial infections, particularly those caused by antibiotic-resistant H. influenzae, and for methods of identifying such new agents. Such methods ideally would identify agents that are unrelated to existing antimicrobials and that target different aspects of H. influenzae pathogenesis in the host, compared to existing antimicrobials.

### SUMMARY OF THE INVENTION

[0005] The present invention provides isolated polynucleotides. A polynucleotide may include a nucleotide sequence of the coding sequence in SEQ ID NO:11, 16, 26, 31, 46, 64, 69, 74, 79, 84, 89, 99, 104, 109, 114, 124, 129, 145, 165, 170, 180, 205, 210, 215, 220, 232, 237, 242, 247, 252, 357, 150, 185, 200, 267, 389-443, nucleotides 936-2429 of SEQ ID NO:225, nucleotides 2443-3809 of SEQ ID NO:225, or the complements thereof. In another aspect, a polynucleotide may include a coding sequence encoding a critical polypeptide having structural similarity, for instance, at least about 95 percent structural similarity, with an amino acid sequence of SEQ ID NO: 282, 283, 285, 286, 289, 292, 293, 294, 295, 296, 297, 299, 300, 301, 302, 304, 305, 307, 308, 311, 312, 314, 315, 318, 321, 322, 323, 324, 327, 328, 329, 340, 341, 343, 345,325, 326, 444-498 or may include a coding sequence encoding an essential polypeptide having structural similarity, for instance, at least about 95 percent structural similarity, with an amino acid sequence selected from the group consisting of SEQ ID NO: 282, 283, 285, 286, 289, 293, 294, 295, 296, 297, 300, 301, 302, 304, 307, 311, 312, 314, 321, 322, 323, 324, 327, 328, 329, 340, 341, 345, 325, 326, and 444-498.

[0006] The present invention also provides isolated polypeptides. A polypeptide may include an amino acid sequence of SEQ ID NO:282, 283, 285, 286, 289, 292, 293, 294, 295, 296, 297, 299, 300, 301, 302, 304, 305, 307, 308, 311, 312, 314, 315, 318, 321, 322, 323, 324, 327, 328, 329, 340, 341, 343, 345, 325, 326, and 444-498. In another aspect, the polypeptide is a critical polypeptide, preferably, an essential polypeptide, may have an amino acid sequence having structural similarity, for instance, at least about 95 percent structural similarity, with an amino acid sequence of SEQ ID NO: 282, 283, 285, 286, 289, 292, 293, 294, 295, 296, 297, 299, 300, 301, 302, 304, 305, 307, 308, 311, 312, 314, 315, 318, 321, 322, 323, 324, 327, 328, 329, 340, 341, 343, 345, 325, 326, and 444-498.

[0007] Also provided by the present invention is a method for identifying an agent that binds a polypeptide. The method includes combining a polypeptide and an agent to form a mixture, and determining whether the agent binds the polypeptide. The polypeptide is encoded by a polynucleotide of the present invention. Determining whether the agent binds the polypeptide can include an assay, for instance, an enzyme assay, a binding assay, or a ligand binding assay.

[0008] The method may further include determining whether the agent decreases the growth rate of a microbe. Determining whether the agent decreases the growth rate includes combining a microbe with the agent, incubating the microbe and the agent under conditions suitable for growth of a microbe that is not combined with the agent, and determining the growth rate of the microbe combined with the agent. A decrease in growth rate compared to the microbe that is not combined with the agent indicates the agent decreases the growth rate of the microbe. Preferably the microbe is H. influenzae, and preferably, the microbe is in vitro or in vivo. The present invention includes an agent identified by the method.

[0009] In another aspect of such methods for identifying an agent that binds a polypeptide, the polypeptide is a critical, preferably, an essential, polypeptide having structural similarity, for instance, at least about 95 percent structural similarity, with a polypeptide of the present invention.

[0010] The present invention is also directed to a method for decreasing the growth rate of a microbe. The method includes combining a microbe with an agent that binds to a polypeptide of the present invention. The microbe may by in vitro or in vivo.

[0011] The present invention is further directed to a method for making an H. influenzae with reduced virulence. The method includes altering a coding sequence in an H. influenzae to include a mutation, and determining if the H. influenzae including the mutation has reduced virulence compared to an H. influenzae that does not include the mutation. The non-mutagenized coding sequence can include a coding sequence present at a polynucleotide of the present invention. The mutation may be, for instance; a deletion mutation, an insertion mutation, a nonsense mutation, and a missense mutation. The present invention also includes a H. influenzae having reduced virulence, and a vaccine composition that includes the H. influenzae.

### BRIEF DESCRIPTION OF THE FIGURES

[0012] FIG. 1. Overview of strategy for vector-based targeted coding sequence disruption in H. influenzae.

[0013] FIG. 2. Sequence of the galK coding sequence and flanking regions. The galK coding sequence is in lowercase letters and the PCR primers are underlined.

[0014] FIG. 3. Sequence of the tmk coding sequence and flanking regions. The tmk coding sequence is in lowercase letters and the PCR primers are underlined.

[0015] FIG. 4. Overview of strategy for the direct mutagenesis of a target PCR product. The triangle represents a transposon.

[0016] FIG. 5. Sequence of the aroC coding sequence and flanking regions. The aroC coding sequence is in lowercase letters and the primer sequences are underlined.

[0017] FIG. 6. Sequence of the coaD coding sequence and flanking regions. The coaD coding sequence is in lowercase letters and the primer sequences are underlined.

[0018] FIG. 7. Sequence of the rhlB coding sequence and flanking regions. The rhlB coding sequence is in lowercase letters and the primer sequences are underlined.

[0019] FIG. 8. Sequence of the ribB coding sequence and flanking regions. The ribB coding sequence is in lowercase letters and the primer sequences are underlined.

[0020] FIG. 9. Sequence of the ribF coding sequence and flanking regions. The ribF coding sequence is in lowercase letters and the primer sequences are underlined.

[0021] FIG. 10. Sequence of the yihZ coding sequence and flanking regions. The yihZ coding sequence is in lowercase letters and the primer sequences are underlined.

[0022] FIG. 11. Sequence of the yfgB coding sequence and flanking regions. The yfgB coding sequence is in lowercase letters and the primer sequences are underlined.

[0023] FIG. 12. Sequence of the yrdC coding sequence and flanking regions. The yrdC coding sequence is in lowercase letters and the primer sequences are underlined.

[0024] FIG. 13. Sequence of the suhB coding sequence and flanking regions. The suhB coding sequence is in lowercase letters and the primer sequences are underlined.

[0025] FIG. 14 Sequence of the yhbJ coding sequence and flanking regions. The yhbJ coding sequence is in lowercase letters and the primer sequences are underlined.

[0026] FIG. 15 Sequence of the yihZ, yfgB and yhbJ genes showing the location of the transposon (∇) inserted within each gene.

[0027] FIG. 16. Sequence of the efp coding sequence and flanking regions. The efp coding sequence is in lowercase letters and the PCR primers are underlined.

[0028] FIG. 17. Sequence of the fba coding sequence and flanking regions. The fba coding sequence is in lowercase letters and the PCR primers are underlined.

[0029] FIG. 18. Sequence of the fmt coding sequence and flanking regions. The fmt coding sequence is in lowercase letters and the PCR primers are underlined.

[0030] FIG. 19. Sequence of the IF-1 coding sequence and flanking regions. The IF-1 coding sequence is in lowercase letters and the PCR primers are underlined.

[0031] FIG. 20. Sequence of the IF-2 coding sequence and flanking regions. The IF-2 coding sequence is in lowercase letters and the PCR primers are underlined.

[0032] FIG. 21. Sequence of the IF-3 coding sequence and flanking regions. The IF-3 coding sequence is in lowercase letters and the PCR primers are underlined.

[0033] FIG. 22. Sequence of the ispA coding sequence and flanking regions. The ispA coding sequence is in lowercase letters and the PCR primers are underlined.

[0034] FIG. 23. Sequence of the ispB coding sequence and flanking regions. The ispB coding sequence is in lowercase letters and the PCR primers are underlined.

[0035] FIG. 24. Sequence of the nusA coding sequence and flanking regions. The nusA coding sequence is in lowercase letters and the PCR primers are underlined.

[0036] FIG. 25. Sequence of the pth coding sequence and flanking regions. The pth coding sequence is in lowercase letters and the PCR primers are underlined.

[0037] FIG. 26. Sequence of the tmk coding sequence and flanking regions. The tmk coding sequence is in lowercase letters and the PCR primers are underlined.

[0038] FIG. 27 Sequence of the trxB coding sequence and flanking regions. The trxB coding sequence is in lowercase letters and the PCR primers are underlined.

[0039] FIG. 28. Sequence of the uppS coding sequence and flanking regions. The uppS coding sequence is in lowercase letters and the PCR primers are underlined.

[0040] FIG. 29. Sequence of the L27 coding sequence and flanking regions. The L27 coding sequence is in lowercase letters and the PCR primers are underlined.

[0041] FIG. 30. Sequence of the lepA coding sequence and flanking regions. The lepA coding sequence is in lowercase letters and the PCR primers are underlined.

[0042] FIG. 31. Sequence of the ispA, L27 and trxB coding sequences showing the location of the transposon (∇) inserted within each coding sequence.

[0043] FIG. 32. Sequence of the efp and pth genes showing the location of the transposons (∇) inserted within each gene. Efp was determined to be non-essential, whereas IF-1 and pth were determined to be essential.

[0044] FIG. 33. Sequence of the alr coding sequence and flanking regions. The alr coding sequence is in lowercase letters and the PCR primers are underlined.

[0045] FIG. 34. Sequence of the amiB coding sequence and flanking regions. The amiB coding sequence is in lowercase letters and the PCR primers are underlined.

[0046] FIG. 35. Sequence of the dacA coding sequence and flanking regions. The dacA coding sequence is in lowercase letters and the PCR primers are underlined.

[0047] FIG. 36. Sequence of the dacB coding sequence and flanking regions. The dacB coding sequence is in lowercase letters and the PCR primers are underlined.

[0048] FIG. 37. Sequence of the ddlB coding sequence and flanking regions. The ddlB coding sequence is in lowercase letters and the PCR primers are underlined.

[0049] FIG. 38. Sequence of the ftsI coding sequence and flanking regions. The ftsI coding sequence is in lowercase letters and the PCR primers are underlined.

[0050] FIG. 39. Sequence of the glmS coding sequence and flanking regions. The glmS coding sequence is in lowercase letters and the PCR primers are underlined.

[0051] FIG. 40. Sequence of the glmU coding sequence and flanking regions. The glmU coding sequence is in lowercase letters and the PCR primers are underlined;

[0052] FIG. 41. Sequence of the glnA coding sequence and flanking regions. The glnA coding sequence is in lowercase letters and the PCR primers are underlined.

[0053] FIG. 42. Sequence of the lpp coding sequence and flanking regions. The lpp coding sequence is in lowercase letters and the PCR primers are underlined.

[0054] FIG. 43. Sequence of the mepA coding sequence and flanking regions. The mepA coding sequence is in lowercase letters and the PCR primers are underlined.

[0055] FIG. 44. Sequence of the mtgA coding sequence and flanking regions. The mtgA coding sequence is in lowercase letters and the PCR primers are underlined.

[0056] FIG. 45. Sequence of the mraY coding sequence and flanking regions. The mraY coding sequence is in lowercase letters and the PCR primers are underlined.

[0057] FIG. 46. Sequence of the murB coding sequence and flanking regions. The murB coding sequence is in lowercase letters and the PCR primers are underlined.

[0058] FIG. 47. Sequence of the murC coding sequence and flanking regions. The murC coding sequence is in lowercase letters and the PCR primers are underlined.

[0059] FIG. 48. Sequence of the murD coding sequence and flanking regions. The murD coding sequence is in lowercase letters and the PCR primers are underlined.

[0060] FIG. 49. Sequence of the murE, murF and mraY coding sequences and flanking regions. The murE coding sequence (nucleotides 936-2429) is in lowercase letters, the murF coding sequence (nucleotides 2443-3809) is in italisized lowercase letters, the mraY coding sequence is in italisized uppercase letters, and the PCR primers are underlined.

[0061] FIG. 50. Sequence of the murG coding and flanking regions. The murG coding sequence is in lowercase letters and the PCR primers are underlined.

[0062] FIG. 51. Sequence of the murI coding sequence and flanking regions. The murI coding sequence is in lowercase letters and the PCR primers are underlined.

[0063] FIG. 52. Sequence of the murZ coding sequence and flanking regions. The murZ coding sequence is in lowercase letters and the PCR primers are underlined.

[0064] FIG. 53. Sequence of the nagA coding sequence and flanking regions. The nagA coding sequence is in lowercase letters and the PCR primers are underlined.

[0065] FIG. 54. Sequence of the pal coding sequence and flanking regions. The pal coding sequence is in lowercase letters and the PCR primers are underlined.

[0066] FIG. 55. Sequence of the pbpG coding sequence and flanking regions. The pbpG coding sequence is in lowercase letters and the PCR primers are underlined.

[0067] FIG. 56. Sequence of the pbp2 coding sequence and flanking regions. The pbp2 coding sequence is in lowercase letters and the PCR primers are underlined.

[0068] FIG. 57. Sequence of the ponA coding sequence and flanking regions. The ponA coding sequence is in lowercase letters and the PCR primers are underlined.

[0069] FIG. 58. Sequence of the ponB coding sequence and flanking regions. The ponB coding sequence is in lowercase letters and the PCR primers are underlined.

[0070] FIG. 59. Sequence of the slt coding sequence and flanking regions. The slt coding sequence is in lowercase letters and the PCR primers are underlined.

[0071] FIG. 60. Biosynthetic pathway for H. influenzae peptidoglycan biosynthesis. The genes encoding essential enzymes (alr, ddlB, ftsI, glmU, mraY, murB, murC, murD, murE, murF, murG, murI, murZ, and nagA), and the genes encoding non-essential enzymes (glms, ponA, ponB, pbp2, dacA, dacB, pbpG and amiB) are depicted at the appropriate step in the pathway. 6-P, 6-phosphate; 1-P, 1-phosphate; GlcNAc, N-acetylglucosamine; MurNAc, N-acetylmuramic acid; UDP, uridine diphosphate; L-ala, L-alanine; D-ala, D-alanine; L-glu, L-glutamate; D-Glu, D-glutamate. The ovals attached to MurNAc signify the amino acids added to MurNAc.

[0072] FIG. 61. The H. influenzae cell wall biosynthetic operon. The bars above the operon show the PCR fragment generated by the N/C primer pair for each of the eight genes tested. The triangles represent sequence mapped Tn insertions. FtsL, ftsW and ftsQ are cell division proteins. Chp represents a conserved hypothetical protein.

[0073] FIG. 62. Diagram showing the N/C primer pair used to synthesize the murE/murF PCR fragment and the K/Z primer pairs used to screen the resulting recombinants. Triangles, transposons mapped to the 13 bases between murE and murF, and to the last 32 bases of the murF coding sequence.

[0074] FIG. 63. Predicted amino acid sequences of coding sequences. The name of the coding sequence and the locus is above each amino acid sequence.

[0075] FIG. 64. Oligonucleotides used for the construction of the mrsA deletion fragment. Sequences derived from the chloramphenical (CM) coding sequence are underlined. Sequences derived from the mrsA gene are italicized in bold. Oligonucleotides used to screen for and to confirm the deletion of the mrsA gene.

[0076] FIG. 65. Outline of the protocol for the construction of the mrsA deletion fragment.

[0077] FIG. 66. Sequence of the mrsA coding sequence and flanking regions. The mrsA coding sequence is in lowercase letters. The PCR primers A1 and C2, used to generate the deletion fragments, are boxed. The mrsA sequences used as part of the fusion primers A2 and C1 are underlined.

[0078] FIG. 67. Sequence of the CM coding sequence and flanking regions from pACYC184. The CM coding sequence is in lowercase letters. CM sequences used in the fusion primers B1 and B2 are underlined. Sequences used as primers to confirm the substitution of the CM coding sequence (CM-NR and CM-CR) are in bold italics.

[0079] FIG. 68. Sequence of the mrsA coding sequence showing the PCR primers used for the insertional inactivation of the remaining mrsA coding sequence. The Z primer was also used to confirm the deletion of the mrsA coding sequence.

[0080] FIG. 69. Sequence of mrsA showing the location of the Tn inserts in the H. influenzae wild type strain. Insertions 1 and 3 are located in HI1337, and insertions 15 and 19 are located in HI1463.

[0081] FIG. 70. Sequence of the rpL19 (HI0201, rplS) and rpS16 (HI0204, rpsP) genes and flanking regions. The rpL19 coding sequence is in lowercase letters (nucleotides 2636-2986), the rpS16 coding sequence is in lowercase italicized letters (nucleotides 1001-1249), and the PCR primers are underlined.

[0082] FIG. 71. Sequence of the rpL1 (HI0516, rplA) and rpL11 (HI0517, rplK) genes and flanking regions. The rpL1 coding sequence is in lowercase letters (nucleotides 838-1266), the rpL11 coding sequence is in lowercase italicized letters (nucleotides 1271-1960), and the PCR primers are underlined.

[0083] FIG. 72. Sequence of the rpS21 (HI0531, rpsU) genes and flanking regions. The rpS21 coding sequence is in lowercase letters (nucleotides 1002-1217) and the PCR primers are underlined.

[0084] FIG. 73. Sequence of the rpS6 (HI0547, rpsF) and rpS18 (HI0545, rpsR) genes and flanking regions. The rpS6 coding sequence is in lowercase letters (nucleotides 1084-1461), the rpS18 coding sequence is in lowercase italicized letters (nucleotides 1787-2014), and the PCR primers are underlined.

[0085] FIG. 74. Sequence of the rpS7 (HI0580, rpsG) and rpS12 (HI0581, rpsL) genes. and flanking regions. The rpS7 coding sequence is in lowercase letters (nucleotides 1530-2000), the rpS12 coding sequence is in lowercase italicized letters (nucleotides 999-1373), and the PCR primers are underlined.

[0086] FIG. 75. Sequence of the rpL10 (HI0640, rplJ) and rplL7/12 (HI0641, rplL) genes and flanking regions. The rpL10 coding sequence is in lowercase letters (nucleotides 1002-1493), the rpL7/12 gene sequence is in lowercase italicized letters (nucleotides 1548-1919), and the PCR primers are underlined.

[0087] FIG. 76. Sequence of the rpS10 (HI0776, rpsJ), rpL3 (HI0777, rplC), rpL4 (HI0778, rplD), rpL23 (HI0779, rplW), rpL2 (HI0780, rplB), rpS19 (HI0781, rpsS), rpL22 (HI0782, rplV), rpS3 (HI0783, rpsC), rpL16 (HI0784, rplP), rpL29 (HI0785, rpmC), and rpS17 (HI0786, rpsQ) genes and flanking regions. All of the coding sequences are shown sequentially in lowercase letters: rpS10 (nucleotides 731-1087), rpL3 (nucleotides 1104-1730), rpL4 (nucleotides 1746-2348), rpL23 (nucleotides 2345-2644), rpL2 (nucleotides 2622-3483), rpS19 (nucleotides 3509-3784), rpL22 (nucleotides 3796-4128), rpS3-(nucleotides 4146-4853), rpL16 (nucleotides 4867-5277), rpL29 (nucleotides 5277-5468), and rpS17 (nucleotides 5468-5725). The PCR primers are underlined.

[0088] FIG. 77. Sequence of the rpL14 (HI0788, rplN), rpl24 (HI0789, rplX), rpL5 (HI0790, rplE), rpS14 (HI0791, rpsN), rpS8 (HI0792, rpsH), rpL6 (HI0793, rplF), rpL18 (HI0794, rplR), rpS5 (HI0795, rpsE), rpL30 (HI0796, rpmD), and rpL15 (HI0797, rplO) genes and flanking regions. All of the coding sequences are shown sequentially in lowercase letters: rpL14 (nucleotides 1002-1373), rpL24 (nucleotides 1384-1695), rpL5 (nucleotides 1713-2252), rpS14 (nucleotides 2264-2589), rpS8 (nucleotides 2602-2988), rpL6 (nucleotides 3014-3547), rpL18 (nucleotides 3561-3914), rpS5 (nucleotides 3929-4429), rpL30 (nucleotides 4436-4615), and rpL15 (nucleotides 4619-5053). The PCR primers are underlined.

[0089] FIG. 78. Sequence of the rpL36 (HI0798.1, rpmJ), rpS13 (HI0799, rpsM), rpS11 (HI0800, rpsK), rpS4 (HI0801, rpsD) and rpL17 (HI0803, rplQ) genes and flanking regions. All of the coding sequences are shown sequentially in lowercase letters: rpL36 (nucleotides 1362-1475), rpS13 (nucleotides 1615-1983), rpS11 (nucleotides 1986-2375), rpS4 (nucleotides 2403-3023), and rpL17 (nucleotides 4082-4468). The PCR primers are underlined.

[0090] FIG. 79. Sequence of the rpL21 (HI0880, rplU) gene and flanking regions. The rpL21 coding sequence is in lowercase letters (nucleotides 669-980) and the PCR primers are underlined.

[0091] FIG. 80. Sequence of the rpS2 (HI0913, rpsB) gene and flanking regions. The rpS2 coding sequence is in lowercase letters (nucleotides 1002-1757) and the PCR primers are underlined.

[0092] FIG. 81. Sequence of the rpL28 (HI0951, rpmB) gene and flanking regions. The rpL28 coding sequence is in lowercase letters (nucleotides 961-1197), and the PCR primers are underlined.

[0093] FIG. 82. Sequence of the rpS20 (HI0965, rpsT) gene and flanking regions. The rpS20 gene sequence is in lowercase letters (nucleotides 1002-1271) and the PCR primers are underlined.

[0094] FIG. 83. Sequence of the rpL43 (HI0998, rpmH) gene and flanking regions; The rpL34 coding sequence is in lowercase letters (nucleotides 1001-1135) and the PCR primers are underlined.

[0095] FIG. 84. Sequence of the rpS1 gene (HI1220, rpsA) and flanking regions. The rpS1 coding sequence is in lowercase letters (nucleotides 1002-2651) and the PCR primers are underlined.

[0096] FIG. 85. Sequence of the rpL35 (HI1319, rpmI) and rpL20 (HI1320, rplT) genes and flanking regions. The rpL35 coding sequence is in lowercase letters (nucleotides 948-1217), the rpL20 coding sequence is in lowercase italicized letters (nucleotides 1284-1637), and the PCR primers are underlined.

[0097] FIG. 86. Sequence of the rpS15 (HI1328, rpsO) gene and flanking regions. The rpS15 coding sequence is in lowercase letters (nucleotides 1002-1271) and the PCR primers are underlined.

[0098] FIG. 87. Sequence of the rpS9 (HI1442, rpsI) and rpL13 (HI1443, rpsM) genes and flanking regions. The rpS9 coding sequence is in lowercase letters (nucleotides 1608-2000), the rpL13 gene sequence is in lowercase italicized letters (nucleotides 1163-1591), and the PCR primers are underlined.

[0099] FIG. 88. Sequence of the rpL25 gene (HI1630, rplY) and flanking regions. The rpL25 coding sequence is in lowercase letters (nucleotides 1001-1288) and the PCR primers are underlined.

[0100] FIG. 89. Sequence of the dnaE gene and flanking regions. The dnaE coding sequence is in lowercase letters (nucleotides 1001-4480) and the PCR primers are underlined.

[0101] FIG. 90. Sequence of the mesJ gene and flanking regions. The mesJ coding sequence is in lowercase letters (nucleotides 1001-2293) and the PCR primers are underlined.

[0102] FIG. 91. Sequence of the cdsA gene (110919) and flanking regions. The cdsA coding sequence is in lowercase letters (nucleotides 1101-1967) and the PCR primers are underlined.

[0103] FIG. 92. Sequence of the pyrH gene (HI1065) and flanking regions. The pyrH coding sequence is in lowercase letters (nucleotides 1604-2317) and the PCR primers are underlined.

[0104] FIG. 93. Sequence of the coaE gene (HI10890) and flanking regions. The coaE coding sequence is in lowercase letters (nucleotides 981-1613) and the PCR primers are underlined.

[0105] FIG. 94. Sequence of the emrB gene (HI0897) and flanking regions. The emrB coding sequence is in lowercase letters (nucleotides 1001-2533) and the PCR primers are underlined.

[0106] FIG. 95. Predicted amino acid sequences of coding sequences. The name of the coding sequence and the locus is above each amino acid sequence.

[0107] FIG. 96. Nucleotide sequences of open reading frames. The name of the open reading frame and the locus is above each nucleotide sequence.

[0108] FIG. 97. A. DNA sequence (SEQ ID NO:500) of tmk encoding a C-terminal hexahistidine tag. The 5′ and 3′ primers are underlined in italics. Sequence in the coding strand that is not native tmk but was added in the process of cloning is further indicated in bold. Restriction sites used for cloning are indicated. B. Amino acid sequence (SEQ ID NO:501) encoded by the coding region of SEQ ID NO:500. Non-native amino acids added as a result of cloning are indicated in bold. C. Plasmid Map of H. influenzae Tmk 6XCT in the pET15b Expression Vector.

### DETAILED DESCRIPTION OF PREFERRED EMBODIMENTS OF THE INVENTION

[0109] The sequence of the H. influenzae genome has been determined and includes about 1,738 coding sequences (see, for instance, Fleischmann et al., Science, 269, 496-512 (1995); GenBank Accession Number L42023 and the Accession Numbers cited therein; and at The Institute for Genomic Research (TIGR) comprehensive microbial resource, Haemophilus influenzae KW20 genome page (www.tigr.org/tigr-scripts/CMR2/GenomePage3.spl?database=ghi)). As used herein, the terms “coding sequence,” “coding region,” and “open reading frame” are used interchangeably herein and refer to a nucleotide sequence that encodes a polypeptide and, when placed under the control of appropriate regulatory sequences, expresses the encoded polypeptide. The boundaries of a coding region are generally determined by a translation start codon at its 5′ end and a translation stop codon at its 3′ end. A regulatory sequence is a nucleotide sequence that regulates expression of a coding region to which it is operably linked. Nonlimiting examples of regulatory sequences include promoters, transcription initiation sites, translation start sites, translation stop sites, and terminators. “Operably linked” refers to a juxtaposition wherein the components so described are in a relationship permitting them to function in their intended manner. A regulatory sequence is “operably linked” to a coding region when it is joined in such a way that expression of the coding region is achieved under conditions compatible with the regulatory sequence.

[0110] The function of some coding sequences of the H. influenzae genome has been hypothesized by comparing an H. influenzae coding sequence with a second coding sequence from another organism, where the second coding sequence has a known function. The putative function of many of the H. influenzae coding sequences is described in Fleischmann et al. (Science, 269, 496-512 (1995)), GenBank Accession Number L42023, and at The Institute for Genomic Research (TIGR) comprehensive microbial resource, Haemophilus influenzae KW20 genome page (www.tigr.org/tigr-scripts/CMR2/GenomePage3.spl?database=ghi). This subset of coding sequences is referred to herein as “known coding sequences.” However, even though the function of these coding sequences can be hypothesized, for many it is unknown if they are required for bacterial growth. Those known coding sequences that are required for bacterial growth are potential novel targets for antimicrobial therapy.

[0111] At this time, it is not possible to predict the function of some of the polypeptides that the approximately 1,738 coding sequences of the H. influenzae genome are predicted to encode. This subset of coding sequences is referred to herein as “unknown coding sequences.” Among the unknown coding sequences in the H. influenzae genome, those that are required for cell growth are potential novel targets for antimicrobial therapy.

[0112] As used herein, a “critical coding sequence” encodes a polypeptide that is required for a bacterial cell, preferably H. influenzae, H. ducreyi, or H. aegyptius, more preferably, H. influenzae, to grow at a normal growth rate in vitro or in vivo, preferably in vitro. A coding sequence is a critical coding sequence when mutagenesis of the coding sequence in a bacterial cell decreases the growth rate of the bacterial cell to, in increasing levels of preference, less than about 50%, less than about 60%, less than about 80%, most preferably, less than about 90% of the growth rate of the bacterial cell that does not contain the mutated coding sequence. Methods of measuring the growth rate of microbes are well known and routine in the art and include, for instance, measurement by changes in optical density of a liquid culture as a function of time, or measurement by changes in colony diameter as a function of time. A critical coding sequence may encode a polypeptide having a known function, or in some aspects of the invention, encode a polypeptide having an unknown function. Preferably, a critical coding sequence encodes a polypeptide having a known function.

[0113] A polypeptide encoded by a critical coding sequence is referred to herein as a “critical polypeptide.” As used herein, the term “polypeptide” refers to a polymer of amino acids and does not refer to a specific length of a polymer of amino acids. Thus, for example, the terms peptide, oligopeptide, protein, and enzyme are included within the definition of polypeptide. This term also includes post-expression modifications of the polypeptide, for example, glycosylations, acetylations, phosphorylations and the like.

[0114] As used herein, growth of a microbe “in vitro” refers to growth in, for instance, a test tube or on an agar plate. Growth of a microbe “in vivo” refers to growth in, for instance, a cultured cell or in an animal. As used herein, the term “microbe” and “bacteria” are used interchangeably and include single celled prokaryotic and lower eukaryotic (e.g., fungi) organisms, preferably prokaryotic organisms.

[0115] Preferably, a critical coding sequence is an essential coding sequence. An “essential coding sequence,” as used herein, is a coding sequence that encodes a polypeptide that is essential for the bacterial cell, preferably H. influenzae, H. ducreyi, or H. aegyptius, more preferably, H. influenzae, to grow in vitro or in vivo, preferably in vitro. Such polypeptides are referred to herein as “essential polypeptides.” An essential coding sequence may encode a polypeptide having an unknown function, or in some aspects of the invention, encode a polypeptide having a known function. Preferably, an essential coding sequence encodes a polypeptide having a known function.

[0116] Identification of these critical coding sequences, preferably essential coding sequences, provides a means for discovering new agents with different targets and mechanisms of action compared to existing agents that are used to inhibit bacteria, preferably H. influenzae, H. ducreyi, or H. aegyptius, more preferably, H. influenzae. As used herein, the term “agent” refers to chemical compounds, including, for instance, an organic compound, an inorganic compound, a metal, a polypeptide, a non-ribosomal polypeptide, a polyketide, or a peptidomimetic compound that binds to a particular polypeptide or nucleotide sequence. The terms “binds to a polypeptide” and “binds a polypeptide” refer to a condition of proximity between an agent and a polypeptide. The association may be non-covalent, wherein the juxtaposition is energetically favored by hydrogen bonding, van der Waals forces, or electrostatic interactions, or it may be covalent. The identification of coding sequences of microbes, preferably H. influenzae, H. ducreyi, or H. aegyptius, more preferably, H. influenzae, that are useful in the present invention can begin by identifying coding sequences predicted to encode a polypeptide. The coding sequences can be identified in databases, including, for instance, the GenBank database, the TIGR Comprehensive Microbial Resource, and the Kyoto Encyclopedia of Genes and Genores. The identification of such coding sequences can include constructing contigs from data present in such databases.

[0117] The data obtained from the databases may contain the nucleotide sequence of genomic clones and predicted open reading frames. However, even though the putative coding sequences may have been known, there was no indication that the coding sequences were in fact expressed, or in fact critical coding sequences. For instance, there is limited data known in the art regarding regulatory regions required for the transcription of a nucleotide sequence in H. influenzae. Moreover, prior to the experiments described herein, there was generally no evidence that the critical coding sequences and essential coding sequences identified herein were actually expressed. Thus, a person of ordinary skill, having the polynucleotide sequence of a genomic clone, would not be able to predict that an open reading frame would be transcribed, or that a coding sequence was critical, preferably, essential.

[0118] Typically, whether a coding sequence is a critical coding sequence, preferably, an essential coding sequence, can be determined by inactivating the coding sequence in a bacterial cell and determining the growth rate of the bacterial cell. Growth can be measured in vitro or in vivo, preferably in vitro. Inactivating a coding sequence may be done by mutating a coding sequence present in a bacterial cell. Mutations include, for instance, a deletion mutation (i.e., the deletion of nucleotides from the coding sequence), an insertion mutation (i.e., the insertion of additional nucleotides, for instance, a transposon, into the coding sequence), a nonsense mutation (i.e., changing a nucleotide of a codon so the codon encodes a different amino acid), and a missense mutation (i.e., changing a nucleotide of a codon so the codon functions as a stop codon). Some insertion mutations and some deletion mutations result in frame-shift mutations. Preferably, a coding sequence in a bacterial cell is engineered to contain an insertion.

[0119] Methods for engineering a coding sequence to contain an insertion are known in the art. Preferably, the insertion is a transposon. In general, a selected coding sequence can be subjected to transposon mutagenesis by isolating or synthesizing the coding sequence by methods known in the art, including, for instance, the polymerase chain reaction (PCR). Preferably, the coding sequence includes about 1,000 base pairs (bp) flanking the coding sequence (i.e., about 500 bp upstream and about 500 bp downstream of the coding sequence), more preferably, about 2,000 bp flanking the coding sequence. Optionally, the coding sequence may be ligated to a vector. Preferably, a vector is a suicide vector, i.e., it is unable to replicate in H. influenzae. An example of a suicide plasmid that can be used with H. influenzae is pBR322. A vector is a replicating polynucleotide, such as a plasmid, phage, or cosmid, to which another polynucleotide may be attached so as to bring about the replication of the attached polynucleotide. Construction of vectors containing a polynucleotide of the invention employs standard ligation techniques known in the art. See, e.g., Sambrook et al, Molecular Cloning: A Laboratory Manual., Cold Spring Harbor Laboratory Press (1989). A vector can provide for further cloning (amplification of the polynucleotide), i.e., a cloning vector, or for expression of the polypeptide encoded by the coding region, i.e., an expression vector. Preferably the vector is a plasmid.

[0120] The coding sequence is subjected to in vitro transposon mutagenesis using routine methods known in the art. Preferably, in vitro mutagenesis is accomplished by using Tn7, available under the trade designation GPS-M (New England Biolabs, Beverly, Mass.), or using Tn5 as described by Goryshin and Reznikoff, J. Biol. Chem., 273, 7367-7374 (1998), and available under the trade designation EZ::TN (Epicentre, Madison, Wis.). The transposon typically includes a coding sequence that encodes a selectable marker. A selectable marker can render a cell resistant to an antibiotic, for example kanamycin, ampicillin, chloramphenicol, tetracycline, and neomycin.

[0121] Following mutagenesis, the coding sequence may be introduced to a bacterial cells, preferably an H. influenzae strain, using methods known in the art, and the transformed strains are incubated under conditions that select for those transformants containing the transposon present in the chromosome. A solid medium (e.g., media containing about 1.5 % agar) or liquid medium may be used. Examples of rich media include brain heart infusion, and others are known in the art (see, for instance, Atlas, Handbook of Microbiological Media, 2 ed., CRC Press (1997)). Preferably, the medium used is solid, containing brain heart infusion supplemented with about 5% Fildes Enrichment. Typically, at least about 40 individual transformants are subjected to DNA amplification of a region of the selected coding sequence that corresponds to about the first 300 bp of the coding sequence, more preferably, the first 500 bp of the coding sequence. If no insertions are found in this region, and subsequent analysis indicates transposon insertions are present upstream or downstream of the coding sequence, the coding sequence that was the target of mutagenesis is considered essential. If insertions are found in this region, but the transformants containing insertions in this region have a decreased growth rate, the coding sequence that was the target of mutagenesis is considered to be a critical coding sequence.

[0122] Using these methods, the following critical coding sequences have been identified: the coding sequence present in SEQ ID NO: 11, 16, 26, 31, 46, 64, 69, 74, 79, 84, 89, 99, 104, 109, 114, 124, 129, 145, 150, 165, 170, 180, 185, 200, 205, 210, 215, 220, 232, 237, 242, 247, 252, 267, 357, 389-443, nucleotides 936-2429 of SEQ ID NO:225, and nucleotides 2443-3809 of SEQ ID NO:225. The polypeptides encoded by these coding sequences are SEQ ID NO: 282, 283, 285, 286, 289, 292, 293, 294, 295, 296, 297, 299, 300, 301, 302, 304, 305, 307, 308, 311, 312, 314, 315, 318, 321, 322, 323, 324, 327, 328, 329, 340, 341, 343, 345, 444-498, 325, and 326, respectively. Using these methods, the following essential coding sequences have been identified: the coding sequence present in SEQ ID NO: 11, 16, 26, 31, 46, 69, 74, 79, 84, 89, 104, 109, 114, 124, 145, 165, 170, 180, 205, 210, 215, 220, 232, 237, 242, 247, 252, 357, 389-443, nucleotides 936-2429 of SEQ ID NO:225, and nucleotides 2443-3809 of SEQ ID NO:225. The polypeptides encoded by these coding sequences are SEQ ID NO: 282, 283, 285, 286, 289, 293, 294, 295, 296, 297, 300, 301, 302, 304, 307, 311, 312, 314, 321, 322, 323, 324, 327, 328, 329, 340, 341, 345, 444-498, 325, and 326, respectively.

[0123] The coding sequences of the present invention include critical coding sequences, preferably, essential coding sequences, that are similar to the coding sequences present in SEQ ID NO: 11, 16, 26, 31, 46, 64, 69, 74, 79, 84, 89, 99, 104, 109, 114, 124, 129, 145, 165, 170, 180, 205, 210, 215, 220, 232, 237, 242, 247, 252, 357, 150, 185, 200, 267, 389-443, nucleotides 936-2429 of SEQ ID NO:225, nucleotides 2443-3809 of SEQ ID NO:225, or the complement thereof. The similarity is referred to as structural similarity and is determined by aligning the residues of the two polynucleotides (i.e., the nucleotide sequence of the candidate coding sequence and the nucleotide sequence of the coding region of SEQ ID NO:11, 16, 26, 31, 46, 64, 69, 74, 79, 84, 89, 99, 104, 109, 114, 124, 129, 145, 165, 170, 180, 205, 210, 215, 220, 232, 237, 242, 247, 252, 357, 150, 185, 200, 267, 389-443, nucleotides 936-2429 of SEQ ID NO:225, nucleotides 2443-3809 of SEQ ID NO:225, or the complement thereof) to optimize the number of identical nucleotides along the lengths of their sequences; gaps in either or both sequences are permitted in making the alignment in order to optimize the number of shared nucleotides, although the nucleotides in each sequence must nonetheless remain in their proper order. A candidate coding region is the coding region being compared to a coding region present in SEQ ID NO:11, 16, 26, 31, 46, 64, 69, 74, 79, 84, 89, 99, 104, 109, 114, 124, 129, 145, 165, 170, 180, 205, 210, 215, 220, 232, 237, 242, 247, 252, 357, 150, 185, 200, 267, 389-443, nucleotides 936-2429 of SEQ ID NO:225, nucleotides 2443-3809 of SEQ ID NO:225, or the complement thereof. A candidate coding region can be isolated from a microbe, preferably H. influenzae, or can be produced using recombinant techniques, or chemically or enzymatically synthesized. Preferably, two coding regions are compared using the blastn program of the BLAST search algorithm, which is described by Altshul et al., (Nucl. Acids Res., 25, 3389-3402 (1997)), and available at the National Center for Biotechnology Information (for instance, www.ncbi.nlm.nih.gov/BLAST/, or www.ncbi.nlm.nih.gov/Microb_blast/unfinishedgenome.html). Preferably, the default values for all BLAST search parameters are used. In the comparison of two coding regions using the BLAST search algorithm, structural similarity is referred to as “identities.” Preferably, a polynucleotide includes a coding region having a structural similarity with the coding region of SEQ ID NO:11, 16, 26, 31, 46, 64, 69, 74, 79, 84, 89, 99, 104, 109, 114, 124, 129, 145, 165, 170, 180, 205, 210, 215, 220, 232, 237, 242, 247, 252, 357, 150, 185, 200, 267, 389-443, nucleotides 936-2429 of SEQ ID NO:225, nucleotides 2443-3809 of SEQ ID NO:225, or the complement thereof, of, in increasing order of preference, at least about 40%, at least about 60%, at least about 80%, at least about 90%, most preferably at least about 95% identity.

[0124] Typically, such a candidate coding region having structural similarity to a coding region of one of the listed sequences has activity, i.e., it is a critical coding region or an essential coding region. Whether such a candidate coding region is critical or essential can be determined by evaluating whether the candidate coding region encodes a polypeptide that is able to complement a mutation of the appropriate coding region in H. influenzae, preferably the H. influenzae available from the American Type Culture Collection as ATCC 51907. For instance, to determine if a coding region having structural similarity to the coding region present in SEQ ID NO:64 is a critical coding region, the coding region can be expressed in an H. influenzae containing a mutation in the coding region present at SEQ ID NO:64. If the growth rate of the H. influenzae is restored, then the candidate coding region is a critical coding region. Likewise, to determine if a coding region having structural similarity to the coding region present in SEQ ID NO:11 is an essential coding region, the coding region can be expressed in a H. influenzae containing a mutation in the coding region present at SEQ ID NO:11. If the growth rate of the H. influenzae is restored, then the candidate coding region is an essential coding region. For example, a candidate coding region can be introduced into H. influenzae on a plasmid and expressed, and using the methods described herein, the chromosomal copy of the appropriate coding region can be inactivated. If insertions of the chromosomal copy of the appropriate coding region are identified, then the candidate coding region is an essential coding region.

[0125] Preferably the polynucleotides of the present invention are isolated. As used herein, an “isolated” polypeptide or polynucleotide means a polypeptide or polynucleotide that has been either removed from its natural environment, produced using recombinant techniques, or chemically or enzymatically synthesized. Typically, an isolated polynucleotide of the present invention does not include the entire genome of the microbe, preferably, H. influenzae, from which the polynucleotide was obtained. Preferably, a polypeptide or polynucleotide of this invention is purified, i.e., essentially free from any other polypeptides or polynucleotides and associated cellular products or other impurities.

[0126] The present invention includes the critical polypeptides and essential polypeptides encoded by the coding sequences of the present invention. Preferably, a polypeptide of the present invention is isolated, more preferably, purified. The critical, preferably, essential, polypeptides of the present invention include polypeptides that are similar to the polypeptides present in SEQ ID NO: 282, 283, 285, 286, 289, 292, 293, 294, 295, 296, 297, 299, 300, 301, 302, 304, 305, 307, 311, 312, 314, 321, 322, 323, 324, 327, 328, 329, 340, 341, 345, 325, 326, 292, 299, 305, 308, 315, 318, 343, 444-498. The similarity is referred to as structural similarity and is determined by aligning the residues of the two polypeptides (i.e., the amino acid sequence of the candidate polypeptide and the amino acid sequence of SEQ ID NO:282, 283, 285, 286, 289, 293, 294, 295, 296, 297, 300, 301, 302, 304, 307, 311, 312, 314, 321, 322, 323, 324, 327, 328, 329, 340, 341, 345, 325, 326, 292, 299, 305, 308, 315, 318, 343, 444-498 to optimize the number of identical amino acids along the lengths of their sequences; gaps in either or both sequences are permitted in making the alignment in order to optimize the number of shared amino acids, although the amino acids in each sequence must nonetheless remain in their proper order. A candidate amino acid sequence is the polypeptide being compared to one of SEQ ID NO:282, 283, 285, 286, 289, 293, 294, 295, 296, 297, 300, 301, 302, 304, 307, 311, 312, 314, 321, 322, 323, 324, 327, 328, 329, 340, 341, 345, 325, 326, 292, 299, 305, 308, 315, 318, 343, 444-498. A candidate amino acid sequence can be isolated from a microbe, preferably H. influenzae, or can be produced using recombinant techniques, or chemically or enzymatically synthesized. Preferably, two amino acid sequences are compared using the tblastn program of the BLAST search algorithm, which is described by Altshul et al., (Nucl. Acids Res., 25, 3389-3402 (1997)), and available at the National Center for Biotechnology Information (for instance, www.ncbi.nlm.nih.gov/Microb_blast/unfinishedgenome.html, or www.ncbi.nlm.nih.gov/BLAST/). Preferably, the default values for all BLAST search parameters are used. In the comparison of two amino acid sequences using the BLAST search algorithm, structural similarity is referred to as “identities.” Preferably, a polypeptide includes an amino acid sequence having a structural similarity with SEQ ID NO:282, 283, 285, 286, 289, 293, 294, 295, 296, 297, 300, 301, 302, 304, 307, 311, 312, 314, 321, 322, 323, 324, 327, 328, 329, 340, 341, 345, 325, 326, 292, 299, 305, 308, 315, 318, 343, 444-498 of, in increasing order of preference, at least about 56%, at least about 60%, at least about 70%, at least about 75%, at least about 80%, at least about 90%, most preferably at least about 95% identity.

[0127] Typically, such a candidate polypeptide having structural similarity to an amino acid sequence of the present invention has activity, i.e., it is a critical polypeptide or an essential polypeptide. Whether such a candidate polypeptide is critical or essential can be determined by evaluating whether it is able to complement a mutation of the appropriate coding region in H. influenzae, preferably the H. influenzae available from the American Type Culture Collection as ATCC 51907. For instance, to determine if a polypeptide having structural similarity to SEQ ID NO:292 is a critical polypeptide, the ability of the candidate polypeptide to complement an H. influenzae that contains a mutation such that it does not express a polypeptide having the sequence SEQ ID NO:292 may be determined. If the growth rate of the H. influenzae is restored, then the candidate polypeptide is a critical polypeptide. Likewise, to determine if a polypeptide having structural similarity to SEQ ID NO:282 is an essential polypeptide; the ability of the candidate polypeptide to complement an H. influenzae that contains a mutation such that it does not express a polypeptide having the sequence SEQ ID NO:282 may be determined. If the growth rate of the H. influenzae is restored, then the candidate coding region is an essential coding region. For example, a coding region encoding a candidate polypeptide can be introduced into H. influenzae on a plasmid and expressed, and using the methods described herein, the chromosomal copy of the appropriate coding region can be inactivated. If insertions of the chromosomal copy of the appropriate gene are identified, then the candidate polypeptide is an essential polypeptide.

[0128] Insertional inactivation of critical coding sequences, preferably, essential coding sequences, allows different classes of coding sequences to be identified. Examples of different classes include, for instance, coding sequences encoding proteins involved in cell surface metabolism, enzymes involved in cellular biosynthetic pathways including cell wall biosynthesis and assembly, components of the TCA cycle, proteins similar to oligopeptide transport proteins of the ATP-binding cassette (ABC) transporter superfamily, and involved in cellular regulatory and repair processes, and coding sequences affecting morphogenesis and cell division, secretion and sorting of proteins, and signal transduction systems.

[0129] The critical coding sequences, preferably, essential coding sequences may be cloned by PCR, using microbial, preferably H. influenzae, H. ducreyi, or H. aegyplius, more preferably, H. influenzae, genomic DNA as the template. When H. influenzae is used, genomic DNA may be obtained from the American Type Culture Collection as ATCC 51907D. For ease of inserting the open reading frame into vectors, preferably expression vectors, PCR primers may be chosen so that the PCR-amplified coding sequence has a restriction enzyme site at the 5′ end preceding the initiation codon ATG, and a restriction enzyme site at the 3′ end after the termination codon TAG, TGA or TAA. If desirable, the codons in the coding sequence may be changed, without changing the amino acids, to optimize expression of a polypeptide encoded by an essential coding sequence. For instance, if an essential coding sequence is to be expressed in E. coli, the codons of the coding sequence can be changed to comply with the E. coli codon preference (see, for instance, Grosjean and Fiers, Gene, 18, 199-209 (1982), and Konigsberg et al., Proc. Natl. Acad. Sci., USA, 80, 687-691 (1983)). Optimization of codon usage may lead to an increase in the expression of the encoded polypeptide when produced in a microbe other than the microbe from which the essential coding sequence was isolated. If the polypeptide is to be produced extracellularly, either in the periplasm of, for instance, E. coli or other bacteria, or into the cell culture medium, the coding sequence may be cloned without its initiation codon and placed into an expression vector behind a signal sequence.

[0130] Proteins may be produced in prokaryotic or eukaryotic expression systems using known promoters, vectors, and hosts. Such expression systems, promoters, vectors, and hosts are known to the art. A suitable host cell may be used for expression of the polypeptide, such as E. coli, other bactena, including Bacillus and H. influenzae, yeast, including Pichia pastoris and Saccharomyces cerevisiae, insect cells, or mammalian cells, including CHO cells, utilizing suitable vectors known in the art. Proteins may be produced directly or fused to a polypeptide, and either intracellularly or extracellularly by secretion into the periplasmic space of a bacterial cell or into the cell culture medium. Secretion of a protein typically requires a signal peptide (also known as pre-sequence); a number of signal sequences from prokaryotes and eukaryotes are known to function for the secretion of recombinant proteins. During the protein secretion process, the signal peptide is removed by signal peptidase to yield the mature protein.

[0131] The polypeptide encoded by a critical coding sequence, preferably, an essential coding sequence, may be isolated. To simplify the isolation process, a purification tag may be added either at the 5′ or 3′ end of the coding sequence. Commonly used purification tags include a stretch of six histidine residues (U.S. Pat. Nos. 5,284,933 and 5,310,663), a streptavidin-affinity tag described by Schmidt and Skerra, Protein Engineering, 6, 109-122 (1993), a FLAG peptide (Hopp et al, Biotechnology, 6, 1205-1210 (1988)), glutathione S-transferase (Smith and Johnson, Gene, 67, 31-40 (1988)), and thioredoxin (LaVallie et al., Bio/Technology, 11, 187-193 (1993)). To remove these tags, a proteolytic cleavage recognition site may be inserted at the fusion junction. Commonly used proteases are factor Xa, thrombin, and enterokinase.

[0132] The identification of critical coding sequences, preferably, essential coding sequences, renders them useful in methods of identifying new agents according to the present invention. Such methods include assaying potential agents for the ability to interfere with expression of a critical coding sequence, preferably, an essential coding sequence, thereby preventing the expression and decreasing the concentration of a polypeptide encoded by the coding sequence. Without intending to be limiting, it is anticipated that agents can~act by, for instance, interacting with a critical coding sequence, preferably, an essential coding sequence, interacting with a nucleotide sequence (e.g., a promoter sequence) that is adjacent to a critical coding sequence, preferably, an essential coding sequence, or inhibiting expression of a polypeptide involved in regulating expression of a critical coding sequence, preferably, an essential coding region. Agents that can be used to inhibit the expression of a critical coding sequence, preferably, an essential coding region include, for instance, the use of anti-sense polynucleotides that are complementary to the mRNA molecules transcribed from the coding sequence, and double stranded RNA (Fire et al., Nature, 391, 806-11 (1998)).

[0133] Such methods also include assaying potential agents for the ability to bind to a polypeptide encoded in whole or in part by a nucleotide sequence set forth in any one of the coding sequence present in SEQ ID NO:11, 16, 26, 31, 46, 64, 69, 74, 79, 84, 89, 99, 104, 109, 114, 124, 129, 145, 165, 170, 180, 205, 210, 215, 220, 232, 237, 242, 247, 252, 357, 150, 185, 200, 267, 389-443, nucleotides 936-2429 of SEQ ID NO:225, nucleotides 2443-3809 of SEQ ID NO:225, or the complementary strand thereof. Optionally, agents that bind to such a polypeptide can be further evaluated to determine if they inhibit the function of the polypeptide to which they bind.

[0134] A polypeptide produced by a critical coding sequence, preferably, an essential coding sequence, may be used in assays including, for instance, high throughput assays, to screen for agents that inhibit the function of the polypeptide. The sources for potential agents to be screened include, for instance, chemical compound libraries, fermentation media of Streptomycetes, other bacteria and fungi, and cell extracts of plants and other vegetations. For proteins with known enzymatic activity, assays may be established based on the activity, and a large number of potential agents can be screened for ability to inhibit the activity. Such assays are referred to herein as “enzyme assays.” Enzyme assays vary depending on the enzyme, and typically are known to the art.

[0135] For proteins that interact with another protein or nucleic acid, assays may be established to measure such interaction directly, and the potential agents screened for the ability to inhibit the binding interaction (referred to herein as “binding assays”). In another aspect of the invention, assays can be established allowing the identification of agents that bind to a polypeptide encoded by an essential coding sequence (referred to herein as “ligand binding assays”).

[0136] For proteins that interact with another protein or nucleic acid, such binding interactions may be evaluated indirectly using the yeast two-hybrid system described in Fields and Song, Nature, 340, 245-246 (1989), and Fields and Sternglanz, Trends in Genetics, 10, 286-292 (1994). The two-hybrid system is a genetic assay for detecting interactions between two polypeptides. It can be used to identify proteins that bind to a known protein of interest, or to delineate domains or residues critical for an interaction. Variations on this methodology have been developed to clone coding sequences that encode DNA-binding proteins, to identify polypeptides that bind to a protein, and to screen for drugs. The two-hybrid system exploits the ability of a pair of interacting proteins to bring a transcription activation domain into close proximity with a DNA-binding domain that binds to an upstream activation sequence (UAS) of a reporter coding sequence, and is generally performed in yeast. The assay requires the construction of two hybrid coding sequences encoding (1) a DNA-binding domain that is fused to a protein X, and (2) an activation domain fused to a protein Y. The DNA-binding domain targets the first hybrid protein to the UAS of the reporter coding sequence; however, because most proteins lack an activation domain, this DNA-binding hybrid protein does not activate transcription of the reporter coding sequence. The second hybrid protein, which contains the activation domain, cannot by itself activate expression of the reporter because it does not bind the UAS. However, when both hybrid proteins are present, the noncovalent interaction of protein X and protein Y tethers the activation domain to the UAS, activating transcription of the reporter coding sequence. When the polypeptide encoded by, for instance, an essential coding sequence (protein X, for example) is already known to interact with another protein or nucleic acid (protein Y, for example), this binding assay can be used to detect agents that interfere with the interaction of X and Y. Expression of the reporter coding sequence is monitored as different test agents are added to the system; the presence of an inhibitory agent inhibits binding and results in lack of a reporter signal.

[0137] When the function of a polypeptide encoded by, for instance, an essential coding sequence is unknown and no ligands are known to bind the polypeptide, the yeast two-hybrid assay can also be used to identify proteins that bind to the polypeptide. In an assay to identify proteins that bind to protein X (the target protein), a large number of hybrid coding sequences, each containing a different protein Y, are produced and screened in the assay. Typically, Y is encoded by a pool of plasmids in which total cDNA or genomic DNA is ligated to the activation domain. This system is applicable to a wide variety of proteins, and it is not even necessary to know the identity or function of protein Y. The system is highly sensitive and can detect interactions not revealed by other methods; even transient interactions may trigger transcription to produce a stable mRNA that can be repeatedly translated to yield the reporter protein. When a protein is identified that binds to an essential polypeptide, the two-hybrid system can be used in a binding assay to identify agents that inhibit binding and result in lack of a reporter signal.

[0138] Ligand binding assays known to the art may be used to search for agents that bind to the target protein. Without intending to be limiting, one such screening method to identify direct binding of test ligands to a target protein is described in Bowie et al. (U.S. Pat. No. 5,585, 277). This method relies on the principle that proteins generally exist as a mixture of folded and unfolded states, and continually alternate between the two states. When a test ligand binds to the folded form of a target protein (i.e., when the test ligand is a ligand of the target protein), the target protein molecule bound by the ligand remains in its folded state. Thus, the folded target protein is present to a greater extent in the presence of a test ligand which binds the target protein, than in the absence of a ligand. Binding of the ligand to the target protein can be determined by any method which distinguishes between the folded and unfolded state of the target protein. The function of the target protein need not be known in order for this assay to be performed.

[0139] Another method for identifying ligands for a target protein is described in Wieboldt et al., Anal. Chem., 69, 1683-1691 (1997). This technique screens combinatorial libraries of 20-30 agents at a time in solution phase for binding to the target protein. Agents that bind to the target protein are separated from other library components by centrifugal ultrafiltration. The specifically selected molecules that are retained on the filter are subsequently liberated from the target protein and analyzed by HPLC and pneumatically assisted electrospray (ion spray) ionization mass spectroscopy. This procedure selects library components with the greatest affinity for the target protein, and is particularly useful for small molecule libraries.

[0140] Another method allows the identification of ligands present in a sample using capillary electrophoresis (CE) (see Hughes et al., U.S. Pat. No. 5,783,397). The sample and the target protein are combined and resolved. The conditions of electrophoresis results in simultaneously fractionating the components present in the sample and screening for components that bind to the target molecule. This method is particularly useful for complex samples including, for instance, extracts of plants, animals, microbes, or portions thereof and chemical libraries produced by, for instance, combinatorial chemistry.

[0141] The agents identified by the initial screens are evaluated for their effect on survival of microbes, preferably H. influenzae, H. ducreyi, or H. aegyplius, more preferably, an H. influenzae. Agents that interfere with bacterial survival are expected to be capable of preventing the establishment of an infection or reversing the outcome of an infection once it is established. Agents may be bacteriocidal (i.e., an agent kills the microbe and prevents the replication of the microbe) or bacteriostatic (i.e., an agent reversibly prevents replication of the microbe). Preferably, the agent is bacteriocidal. Such agents will be useful to treat a subject infected with H. influenzae, H. ducreyi, or H. aegyptius, more preferably, an H. influenzae, or at risk of being infected by H. influenzae, H. ducreyi, or H. aegyptius, more preferably, an H. influenzae.

[0142] The identification of H. influenzae critical coding sequences, preferably, essential coding sequences, also provides for microorganisms exhibiting reduced virulence, which may be useful in vaccines. The term “vaccine” refers to a composition that, upon administration to a subject, will provide protection against H. influenzae, H. ducreyi, or H. aegyptius, more preferably, an H. influenzae. Administration of a vaccine to a subject will produce an immunological response to the H. influenzae and result in immunity. A vaccine is administered in an amount effective to result in some therapeutic benefit or effect so as to result in an immune response that inhibits or prevents an infection by H. influenzae in a subject, or so as to result in the production of antibodies to an H. influenzae.

[0143] Such microorganisms that can be used in a vaccine include H. influenzae, H. ducreyi, or H. aegyptius, more preferably, an H. influenzae, mutants containing a mutation in a coding sequence represented by any one of the coding sequence present in SEQ ID NO:11, 16, 26, 31, 46, 64, 69, 74, 79, 84, 89, 99, 104, 109, 114, 124, 129, 145, 165, 170, 180, 205, 210, 215, 220, 232, 237, 242, 247, 252, 357, 150, 185, 200, 267, 389-443, nucleotides 936-2429 of SEQ ID NO:225, nucleotides 2443-3809 of SEQ ID NO:225, or a coding sequence having structural similarity thereto. Optionally, an H. influenzae, H. ducreyi, or H. aegyptius, more preferably, an H. influenzae, includes more than one mutation. The reduced virulence of these organisms and their immunogenicity may be confirmed by administration to a subject. Animal models useful for evaluating H. influenzae virulence in a variety of conditions, including for example, otitis media in gerbils and chinchilla, are known in the art.

[0144] While it is possible for an avirulent microorganism of the invention to be administered alone, one or more of such mutant microorganisms are preferably administered in a vaccine composition containing a suitable adjuvant(s) and a pharmaceutically acceptable diluent(s) or carrier(s). The carrier(s) must be “acceptable” in the sense of being compatible with the avirulent microorganism of the invention and not deleterious to the subject to be immunized. Typically, the carriers will be water or saline which will be sterile and pyrogen free. The subject to be immunized is a subject needing protection from a disease caused by a virulent form of H. influenzae.

[0145] Any adjuvant known in the art may be used in the vaccine composition, including oil-based adjuvants such as Freund's Complete Adjuvant and Freund's Incomplete Adjuvant, mycolate-based adjuvants (e.g., trehalose dimycolate), bacteria lipopolysaccharide (LPS), peptidoglycans (i.e., mumins, mucopeptides, or glycoprotelns such as N-Opaca, muramyl dipeptide (MDP), or MDP analogs), proteoglycans (e.g., extracted from Klebsiela spp.), streptococcal preparations (e.g., OK432), the “Iscoms” of EP 109 942, EP 180 564 and EP 231 039, aluminum hydroxide, saponin, DEAE-dextran, neutral oils (such as miglyol), vegetable oils (such as arachis oil), liposomes, the Ribi adjuvant system (see, for example GB-A-2 189 141), or adjuvants available under the trade designation BIOSTIM (e.g., 01K2) and PLURONIC polyols. Recently, an alternative adjuvant consisting of extracts of Amycolata, a bacterial genus in the order Actinomycetales, has been described in U.S. Pat. No. 4,877,612. Additionally, proprietary adjuvant mixtures are commercially available. The adjuvant used will depend, in part, on the recipient organism. The amount of adjuvant to administer will depend on the type and size of animal. Optimal dosages may be readily determined by routine methods.

[0146] The vaccine compositions optionally may include pharmaceutically acceptable (i.e., sterile and non-toxic) liquid, semisolid, or solid diluents that serve as pharmaceutical vehicles, excipients, or media. Any diluent known in the art may be used. Exemplary diluents include, but are not limited to, polyoxyethylene sorbitan monolaurate, magnesium stearate, methyl-andpropylhydroxybenzoate, talc, alginates, starches, lactose, sucrose, dextrose, sorbitol, mannitol, gum acacia, calcium phosphate, mineral oil, cocoa butter, and oil of theobroma.

[0147] The vaccine compositions can be packaged in forms convenient for delivery. The compositions can be enclosed within a capsule, sachet, cachet, gelatin, paper or other container. These delivery forms are preferred when compatible with entry of the immunogenic composition into the recipient organism and, particularly, when the immunogenic composition is being delivered in unit dose form. The dosage units can be packaged, e.g., in tablets, capsules, suppositories or cachets.

[0148] The vaccine compositions may be introduced into the subject to be immunized by any conventional method including, e.g., by intravenous, intradermal, intramuscular, intramammary, intraperitoneal, or subcutaneous injection; by oral, sublingual, nasal, anal, vaginal, or transdermal delivery; or by surgical implantation, e.g., embedded under the splenic capsule or in the cornea. The treatment may consist of a single dose or a plurality of doses over a period of time. It will be appreciated that the vaccine of the invention may be useful in the fields of human medicine and veterinary medicine. Thus, the subject to be immunized may be a human or an animal, for example, cows, sheep, pigs, horses, dogs, cats, and poultry such as chickens, turkeys, ducks and geese.

[0149] The present invention is illustrated by the following examples. It is to be understood that the particular examples, materials, amounts, and procedures are to be interpreted broadly in accordance with the scope and spirit of the invention as set forth herein.

### EXAMPLES

### Example 1

### Rapid Transposon Insertional Inactivation for Determining Essentiality of H. influenzae Coding Sequences

Materials and Methods

[0150] Bacterial strains and growth conditions: Haemophilus influenzae Rd was obtained from the American Type Culture Collection as ATCC 51907 and grown in brain-heart infusion (Becton Dickinson, Sparks, Md.) supplemented with 5% Fildes Enrichment (Becton Dickinson) (sBHI) at 37° C. in 5% CO₂.

[0151] Oligonucleotide synthesis: All of the oligonucleotides were synthesized by Genosys (The Woodlands, Tex.).

[0152] Target gene amplification and vector cloning: The target gene with flanking sequences was PCR amplified from 1 microgram (μg) of H. influenzae genomic DNA with the N/C primer set following the AMPLITAQ GOLD (Applied Biosystems, Foster City, Calif.) amplification protocol: 94° C. for 5 minutes (1 cycle); 94° C. for 30 seconds, 55° C. for 1 minute and 72° C. for 3 minutes (30 cycles); and 72° for 5 minutes (1 cycle). The resulting amplicon was cloned into the vector pCR2.1 following the enclosed directions of the Invritrogen cloning kit (Invitrogen, Carlsbad, Calif.) and transformed into competent E. coli InvαF′ cells purchased from Invitrogen. Colonies were screened by restriction analysis to confirm the presence K of the PCR insert. Vector DNA was isolated using columns purchased from Qiagen, Inc. (Valencia, Calif.).

[0153] New England Biolabs GPS-M Tn mutagenesis protocol: Transposon mutagenesis of the vector DNA was performed following the enclosed directions of the GPS-M Mutagenesis kit purchased from New England Biolabs (Beverly, Mass.). Briefly, 320 nanograms (ng) of vector DNA was added to 8 μl 10× GPS buffer, 4 μl GPS buffer 3 and dH₂O to 32 μl. After adding 4 μl of TnsABC transposase, the reaction was incubated for 10 minutes at 37° C. Four μl of Start Solution was then added and the reaction was incubated for 1 hour at 37° C. Following heat inactivation at 75° for 10 minutes, the reaction was phenol extracted, ethanol precipitated and resuspended in 84 μl 10 mM Tris-1 mM EDTA, pH 8.0 (TE). The transposon insertion sites were repaired by adding 4 μl DNA Polymerase I (E. coli) (New England Biolabs, Beverly, Mass.), 12 μl 10× PolA buffer (New England Biolabs), and 12 μl 300 μl dNTP mix to the resuspended vector and incubating for 15 min at room temperature. Four μl 30 mM ATP and 4 μl T4 DNA ligase were then added to ligate the transposon into the vector overnight at 16° C. The vector was then phenol extracted, ethanol precipitated and resuspended in 25 μl TE for transformation into H. influenzae.

[0154] Epicentre Transposon mutagenesis protocol: The target gene with flanking sequences was PCR amplified from 1 μg of H. influenzae genomic DNA with the N/C primer set following the GibcoBRL Platinum Taq amplification protocol: 94° C. for 5 minutes (1 cycle); 94° C. for 30 seconds, 55° C. for 1 minute and 72° C. for 3 minutes (30 cycles); and 72° C. for 5 minutes (1 cycle). Fifty microliters of the reaction was loaded onto a 1.2% agarose gel and the amplicon was isolated. Following the enclosed directions of the Epicentre (Madison, Wis.) EZ::TN <KAN-2> insertion kit, 100 nanograms (ng) of the PCR amplicon was mutagenized for 2 hours at 37° C. After heat inactivation of the transposase at 70° C. for 10 minutes, 20 μl of sterile water was then added and the reaction was passed through a Millipore Ultrafree column (Bedford, Mass.) to remove the enzyme. Gap repair was performed by adding 3 μl 10× E. coli PolA buffer, 3 μl 300 mM dNTP mix and 1.5 μl DNA polymerase I to the reaction and incubating for 15 minutes at room temperature.

[0155] Competent cell preparation and transformation of H. influenzae: Competent cells of H. influenzae were prepared following the protocol outlined by Barcak et al. (Methods in Enzymology, 204, 321-342 (1991)) for transformation using chemically defined M-IV medium. For DNA uptake and transformation a 1 milliliter (ml) vial of stored H. influenzae competent cells was pelleted for 5 minutes and resuspended in 1 ml of freshly prepared M-IV medium. One hundred nanograms of the mutagenized vector DNA was added to the cells. Following incubation for 30 minutes at 37° C., the cells were added to 5 mls sBHI medium and grown for 3 hours with shaking at 37° C. Cell aliquots of 100 μl, 250 μl, and 500 μl were plated onto sBHI plates supplemented with 30 μg/ml kanamycin and incubated overnight at 37° C. with 5% CO₂.

[0156] Colony screening: Individual isolates were initially screened for transposon inserts within the 5′ end of the target gene by PCR amplification using the K/Z primer set as follows: 94° C. for 5 minutes (1 cycle); 94° C. for 30 seconds, 55° C. for 1 minute and 72° C. for 1.5 minutes (25 cycles); and 72° C. for 5 minutes. Ten μl of each reaction was analyzed on a 1.2% agarose gel. If no inserts were detected, the plates were reincubated overnight and additional isolates were then screened targeting small colonies with reduced growth rates. PCR screening for transposon inserts within the entire target amplicon was performed using the N/C primer set as follows: 94° C. for 5 minutes (1 cycle); 94° C. for 30 seconds, 55° C. for 1 minute and 72° C. for 3 minutes (30 cycles); and 72° C. for 5 minutes.

[0157] PCR sequencing: PCR products synthesized with either the K/Z or N/C primer pairs were isolated using the Qiagen MinElute columns. One hundred nanograms of PCR product, 100 ng of Epicentre Kan-2 FP-1 transposon sequencing primer ACCTACAACAAAGCTCTCATCAACC (SEQ ID NO:499) and sterile water to a final volume of 12 μl were added to a single tube and the nucleotide sequence determined.

Results

[0158] The initial overall strategy for targeted gene disruption is outlined in FIG. 1. Primers approximately 1000 base pairs (bp) upstream (N) and downstream (C) of the target gene are designed to amplify the target gene and flanking sequences from Haemophilus genomic DNA. The resulting PCR product is cloned into the E. coli pCR2.1 vector, which cannot replicate in H. influenzae. The vector is then subjected to in vitro transposon mutagenesis, generating a library containing three classes of inserts that are of interest: those with transposon inserts upstream or downstream of the target gene, and those with inserts in the target gene itself. Transformation of the library into H. influenzae allows the vector to recombine into the chromosome, replacing the chromosomal copy of the target gene with the mutagenized PCR product. Plating the cells on kanamycin selects for colonies that have successfully undergone recombination. The resulting colonies are then screened by PCR within the 5′ end of the target gene for the presence of a transposon. The first 300-400 base pairs of the 5′ end is defined as the “essential” region, and primers K and Z are designed to amplify this region. PCR product bands corresponding to the target K/Z fragment do not contain an insert. PCR bands increasing in size by 1200 bp contain a transposon insert. If a transposon insert is present within the essential region, then the gene is determined to be non-essential. If no transposon inserts are found within the essential region, then the upstream and downstream flanking sequences are screened by PCR with primer pair N/C to identify transposon inserts within the flanking regions as confirmation that mutagenesis occurred. If no inserts are found within the essential region but are found within the flanking regions, then the gene is determined to be essential.

[0159] Inactivation of a non-essential gene: We began our assessment of transposon mutagenesis by selecting a known non-essential H. influenzae gene for targeted insertional inactivation. The galK gene (HI0819) and flanking sequences (FIG. 2) were PCR amplified from H. influenzae genomic DNA and cloned into the pCR2.1 vector. Isolated vector DNA was mutagenized in vitro with the GPS-M Mutagenesis kit, transformed into H. influenzae, and plated onto sBHI supplemented with kanamycin. Nineteen colonies were screened by PCR with primer pair K/Z for the presence of transposon inserts within the essential 5′ region. Six of the transformants examined contained transposon inserts; therefore, galK was determined to be non-essential.

[0160] Identification of an essential gene: Having shown that a known non-essential gene could be insertionally inactivated by this method, we then chose a gene expected to be essential for mutagenesis. The H. influenzae tmk gene (HI0456) and flanking sequences (FIG. 3) were PCR amplified from H. influenzae genomic DNA and cloned into the pCR2.1 vector. Following GPS-M in vitro mutagenesis, the vector was transformed into H. influenzae. Recombinants selected on kanamycin plates were then screened by PCR for the presence of transposon inserts within the tmk 5′ essential region using primer pair K/Z. No inserts were-found within any of the sixty-four recombinants screened. These colonies were then screened with the N/C primer pair to identify inserts within the upstream or downstream flanking regions. Fourteen transposon inserts were found upstream of the tmk gene, but none were found downstream of the tmk gene. Since no inserts were found in the essential region but were found upstream, tmk was determined to be essential. Since no inserts were found in the downstream holB gene, this suggested that this gene may also be essential.

[0161] E. coli confirmation of an essential gene: One advantage to using the vector system for mutagenesis is that confirmation of the H. influenzae results can be obtained using E. coli. The mutagenized pCR2.1 vector containing the tmk gene was transformed into E. coli. Transformants were screened by PCR to identify three individual colonies, one containing a vector with a transposon insert in the upstream flanking region, one containing a transposon insert in the downstream flanking region, and one containing a transposon insert in the tmk gene itself. Plasmid DNA was isolated from all three individual colonies and separately transformed into H. influenzae. Kanamycin selected recombinants were then screened by PCR for the presence of the original transposon insert. None were found within the tmk gene or the downstream holB gene, even though each transformed vector contained a transposon insert within these genes. This confirmed that tmk and holB gene were essential. Inserts were again found within the upstream region suggesting that this gene may not be essential. These results are in agreement with the paper published by Akerley et al. (Proc. Nat. Acad. Sci. USA, 95, 8927-8932 (1998)) in which it was determined that tmk and holB are essential, whereas the upstream conserved hypothetical protein is not.

[0162] Direct mutagenesis of the target gene PCR product: There are several inherent difficulties associated with the vector method for insertional inactivation. In vitro mutagenesis results in transposons inserting within the entire vector sequence, not just the target region. This causes high backgrounds and increases the number of recombinants that have to be screened for insertions within the target region. Cloning can be time-consuming and not all PCR products can be cloned into the pCR2.1 vector. The cloned target region may also contain errors from the PCR amplification. To overcome these difficulties, we chose to evaluate if we could perform in vitro mutagenesis on the target PCR product itself and subsequently transform it directly into H. influenzae since H. influenzae has a natural single-stranded DNA uptake system. This protocol is outlined in FIG. 4. The galK gene and flanking sequences were PCR amplified from H. influenzae genomic DNA and mutagenized in vitro with the Epicenter EZ::Tn <Kan-2> transposon. The mutagenized PCR product was then transformed into H. influenzae. Recombinants selected on kanamycin plates were then screened with the K/Z primer pair for inserts within the galK 5′ essential region. Of the 48 colonies screened 6 contained an insert, confirming that galK is not essential. Since these results were identical to the results obtained with the vector method and were achieved more rapidly, the direct mutagenesis of a target gene PCR product with the EZ::Tn <Kan-2> transposon is now the standard methodology by which we evaluate gene essentiality in H. influenzae.

[0163] Evaluation of potential antibacterial targets: A list of potential new antibacterial targets was assembled for insertional inactivation to determine their essentiality in H. influenzae. The list included aroC (chorismate synthase), coaD (phosphopantetheine adenylyltransferase), rhlB (an ATP-dependent RN A helicase), ribB (3,4-dihydroxy-2-butone 4-phosphate synthase), ribF (riboflavin kinase), the conserved hypothetical proteins yihZ and yfgB. All of the gene sequences, flanking regions and PCR primer pairs are shown in FIGS. 5-14. For each gene, the PCR product was synthesized, mutagenized with the EZ::Tn <Kan-2> transposon, and. transformed directly into H. influenzae. Recombinants selected on kanamycin plates were screened with their essential region K/Z primer pair. The results are summarized in Table 1.

TABLE 1
Summary of the evaluation of the potential new antibiotic targets for
essentiality in H. influenzae. Five genes were found to be
essential: aroC, coaD, ribB, ribF and yrdC.

| | SEQ ID | | SEQ ID NO: of | | | |
|---|---|---|---|---|---|---|
| Gene | NO:¹ | Locus² | polypeptide | Putative identification² | Inactivated | No. Of Inserts |
| aroC | 11 | HI0196 | 282 | chorismate biosynthesis | No | 0/96 |
| coaD | 16 | HI0651 | 283 | panthothenate biosynthesis | No | 0/96 |
| rhlB | 21 | HI0892 | 284 | riboflavin biosynthesis | Yes | 21/48 |
| ribB | 26 | HI0764 | 285 | riboflavin biosynthesis | No | 0/96 |
| ribF | 31 | HI0963 | 286 | RNA helicase | No | 0/96 |
| yihZ | 36 | HI0670 | 287 | conserved hypothetical | Yes | 7/16 |
| | | | | protein | | |
| yfgB | 41 | HI0365 | 288 | conserved hypothetical | Yes | 13/48 |
| | | | | protein | | |
| yrdC | 46 | HI0656 | 289 | conserved hypothetical | No | 0/96 |
| | | | | protein | | |
| suhB | 51 | HI0937 | 290 | extragenic suppressor | Yes | 6/48 |
| yhbJ | 56 | HI1146 | 291 | conserved hypothetical | Yes | 20/48 |
| | | | | protein | | |

¹Refers to the coding sequence present at each SEQ ID NO.
²Information obtained through the TIGR Haemophilus influenzae KW20 locus search page (www.tigr.org/tigr-scripts/CMR2/LocusNameSearch.spl?db=ghi).

[0164] Inserts were found in rhlB, yihZ, yfgB, suhB and yhbJ. Since the K primer sequence occurred upstream of the ATG start codon for yihZ, yfgB, and yhbJ, one recombinant containing an insert was sequenced with a transposon primer to determine the exact location of the insert within each gene. All three transposons inserted within the 5′ essential region (FIG. 15); therefore, yihZ, yfgB, and yhbJ are non-essential. The K primers for rhlB and suhB were within the gene coding region, so rhlB and suhB were also non-essential. No inserts were found within aroC, coaD, ribB, ribF and yrdC, so their recombinants were then re-screened with their N/C primer pair to identify inserts within the flanking regions. Inserts were found in the flanking regions of all five genes; therefore, aroC, coaD, ribB, ribF and yrdC were determined to be essential.

### Example 2

### Rapid Transposon Insertional Inactivation for Determining Essentiality of Additional H. influenzae Coding Sequences

[0165] This demonstrates the use of rapid transposon insertional inactivation to evaluate 15 additional H. influenzae coding sequences.

Materials and Methods

[0166] The materials and methods used are described in Example 1.

Results

[0167] The following genes were subjected to insertional inactivation: efp (elongation factor P), fba (fructose-biphosphate aldolase), fmt (methionyl-tRNA formyltransferase), IF-1 (translation initiation factor 1), IF-2 (translation initiation factor 2), IF-3 (translation initiation factor 3), ispA (geranyl transferase), ispB (octaprenyl-diphosphate synthase), nusA (N utilization substance protein A), tmk (thymidylate kinase), trxB (thioredoxin reductase), pth (peptidyl-tRNA hydrolase), uppS (undecaprenyl pyrophosphate synthetase), L27 (ribosomal protein rpL27) and lepA (GTP-binding membrane protein). All of the gene sequences, flanking regions and PCR primer pairs are shown in FIGS. 16-30. For each gene, the PCR product was synthesized, mutagenized with the EZ::Tn <Kan-2> transposon, and transformed directly into H. influenzae. Kanamycin selected recombinants were then screened with their essential region K/Z primer pair. The results are summarized in Table 2.

TABLE 2
Summary of the evaluation of additional potential new
antibiotic targets for essentiality in H. influenzae.
Nine genes were determined to be essential: fba, fmt,
IF1, IF-2, IF-3, nusA, pth, tmk, and uppS.

| | | | SEQ ID | | | |
|---|---|---|---|---|---|---|
| | SEQ | | NO: of | | | |
| | ID | | poly- | Putative | | No. of |
| Gene | NO:¹ | Locus² | peptide | identification² | Insertion³ | inserts |
| efp | 64 | HI0328 | 292 | Translation | + | 33/96* |
| fba | 69 | HI0524 | 293 | Intermediary | − | 0/96 |
| | | | | metabolism | | |
| fmt | 74 | HI0623 | 294 | Translation | − | 0/96 |
| IF-1 | 79 | HI0548 | 295 | Translation | − | 0/96 |
| IF-2 | 84 | HI1248 | 296 | Translation | − | 0/96 |
| IF-3 | 89 | HI1318 | 297 | Translation | − | 0/96 |
| ispA | 94 | HI1438 | 298 | Cell wall | + | 8/48 |
| ispB | 99 | HI0881 | 299 | Quinone | + | 2/48* |
| | | | | synthesis | | |
| nusA | 104 | HI1283 | 300 | Transcription | − | 0/96 |
| pth | 109 | HI0394 | 301 | Protein synthesis | − | 0/96 |
| tmk | 114 | HI0456 | 302 | DNA synthesis | − | 0/96 |
| trxB | 119 | HI1158 | 303 | Redox | + | 20/48 |
| upps | 124 | HI0920 | 304 | Cell wall | − | 0/96 |
| L27 | 129 | HI0879 | 305 | Translation | plus | 13/96* |
| lepA | 134 | HI0016 | 306 | Translation | plus | 11/48 |

*Exhibit a slow growth phenotype when insertion is present in the coding sequence.
¹Refers to the coding sequence present at each SEQ ID NO.
²Information obtained through the TIGR Haemophilus influenzae KW20 locus search page (www.tigr.org/tigr-scripts/CMR2/LocusNameSearch.spl?db=ghi).
³“+”, gene was inactivated; “−”, gene was not inactivated.

[0168] Inserts were found in efp, IF-1, ispA, ispB, pth, trxB, L27 and lepA. Since the K primer sequence occurred upstream of the ATG start codon for ispA, L27 and trxB, one recombinant containing an insert was sequenced with a transposon primer to determine the exact location of the insert within each gene. All three transposons inserted within the 5′ essential region (FIG. 31); therefore, ispA, L27 and trxB are non-essential. The Z primer sequence encompassed the C-terminal region of efp, IF-1 and pth. Since there are reports that transposons can insert within the C-terminal region of essential genes (Akerley et al., Proc. Nat. Acad. Sci. USA, 95, 8927-8932 (1998)), several recombinants containing inserts in these three genes were sequenced to determine the exact location of the inserts. Two independent insertions within efp were mapped to the middle of the gene (FIG. 32); therefore, efp is not essential. However all four insertions within the pth gene mapped to the C-terminal end of pth, and the insertion within the IF-1 gene also mapped to the C-terminal end of IF-1 (FIG. 32). Therefore, we conclude that pth and IF-1 are essential. The K/Z primer pairs for ispB and lepA are within the 5′ coding region, so these genes are non-essential. No inserts were found within the essential region of fba, fmt, IF-2, IF-3, nusA, tmk, and uppS. Recombinant colonies were then re-screened with their N/C primer pair to identify inserts within the flanking regions. Inserts were found in the flanking regions of all seven genes; therefore, fba, fmt, IF-2, IF-3, nusA, tmk, and uppS were determined to be essential.

Discussion

[0169] The unexpected results with several of the genes illustrates the importance of determining gene essentiality in a variety of organisms when selecting potential targets for broad spectrum antibiotic development. In this study fmt (methionyl-tRNA formyltransferase) is essential in H. influenzae whereas it is not essential in E. coli (Mazel et al., EMBO J., 13, 914-923 (1994)). Likewise efp (elongation factor P) and ispB (octaprenyl-diphosphate synthase) are essential in E. coli (Aoki et al., J. Biol. Chem., 272, 32254-32259 (1997); Okada et al., J. Bacteriol., 179, 3058-3060 (1997)), but not essential in H. influenzae. These results show that even organisms within broad categories such as gram-negatives or gram-positives can require different genes for bacterial survival.

[0170] The design of the K/Z primer pair is of critical importance when determining essentiality based on PCR results. If the K primer is designed upstream of the ATG start codon for the practical considerations of GC content and secondary structure, there is the possibility that transposons can insert prior to the. ATG. K/Z screening simply detects transposon inserts anywhere within the K/Z fragment. It does not determine the position of the insertion; therefore, those clones containing insertions downstream of the K primer but upstream of the ATG (not within the target gene) would yield the same PCR product as those clones containing insertions within the actual gene sequence. Hence, it is critical to sequence map clones containing insertions if the K primer is upstream of the ATG codon. Likewise sequence mapping of potential insertions is critical for those genes whose Z primer encompasses the C-terminal end of the gene, since it is possible for essential genes to contain insertions within this region. This most commonly occurs with small genes (<400 bp in length). Our results with pth and IF-1 illustrate, this point. Based on their K/Z PCR product results, both genes were initially determined to be non-essential. However, only after sequence mapping of the inserted clones was it determined that since all of the detected insertions occurred within the C-terminal region of each gene, pth and IF-1 were really essential.

### Example 3

### Rapid Transposon Insertional Inactivation for Determining Essentiality of H. influenzae Coding Sequences Associated with Cell Wall Biosynthesis

Materials and Methods

[0171] The materials and methods used are described in Example 1.

Results

[0172] There are 28 genes associated with cell wall biosynthesis in H. influenzae. The genes directly involved in the biosynthesis of peptidoglycan include glmS (glucosamine-fructose-6P-transferase), glmU (UDP-N-acetylglucosamine pyrophosphorylase), murZ (UDP-NAcGlu 1-carboxyvinyltransferase), murB (UDP-N-acetylenolpyruvoylglucosamine reductase), murC (UDP-N-acetylmuramate-alanine ligase), murD (UDP-N-acetylmuramoylalanine-D-glutamate ligase), murE (UDP-N-acetylmuramyl-tripeptide synthetase), murF (UDP-MurNAc-pentapeptide synthetase), murG (UDP-N-acetylglucosamine-N-acetylmuramyl-pyrophosphoryl UDP N-acetylglucosamine transferase), murI (glutamate racemase), mraY (phospho-N-acetylmuramoyl-pentapeptide-transferase E), alr (alanine racemase), and ddlB (D-alanine-D-alanine ligase). The seven penicillin-binding proteins include ponA (penicillin-binding protein 1A), ponB (penicillin-binding protein 1B), pbp2 (penicillin-binding protein 2), ftsI (penicillin-binding protein 3), dacB (penicillin-binding protein 4), dacA (penicillin-binding protein 5), and pbpG (penicillin-binding protein 7, putative). The remaining genes are those associated with cell wall biosynthesis. They include amiB (N-acetylmuramoyl-L alanine amidase), glnA (glutamine synthase), lpp (lipoprotein PCP precursor), mepA (penicillin-insensitive murein peptidase), mtgA (peptidoglycan transglycosylase), nagA (N-acetylglucosamine-6P-deacetylase), pal (outer membrane protein p6 precursor), and slt (soluble lytic murein transglycosylase).

[0173] All of the gene sequences, flanking regions and PCR primer pairs are shown in FIGS. 33-59. For each gene, the PCR product was synthesized, mutagenized with the EZ::Tn <Kan-2> transposon, and transformed directly into H. influenzae. Kanamycin selected recombinants were then screened with their essential region K/Z primer pair. The results are summarized in Tables 3 and 4.

TABLE 3
The fifteen cell wall biosynthetic genes determined to be essential.

| | SEQ ID | | SEQ ID NO: of | | | No. of |
|---|---|---|---|---|---|---|
| Gene | NO:¹ | Locus² | polypeptide | Putative identification² | Essential | inserts |
| alr | 145 | HI1575 | 307 | alanine racemase | Yes | 0/96 |
| ddlB | 165 | HI1140 | 311 | D-alanine-D-alanine ligase | Yes | 0/96 |
| ftsI | 170 | HI1132 | 312 | penicillin-binding protein 3 | Yes | 0/96 |
| glmU | 180 | HI0624 | 314 | UDP-N-acetylglucosamine | Yes | 0/96 |
| | | | | pyrophosphorylase | | |
| mraY | 205 | HI1135 | 321 | phospho-N-acetylmuramoyl-pentapeptide- | Yes | 0/96 |
| | | | | transferase E | | |
| murB | 210 | HI0268 | 322 | UDP-N-acetylenolpyruvoylglucosamine | Yes | 0/96 |
| | | | | reductase | | |
| murC | 215 | HI1139 | 323 | UDP-N-acetylmuramate-alanine ligase | Yes | 0/96 |
| murD | 220 | HI1136 | 324 | UDP-N-acetylmuramoylalanine-D- | Yes | 0/96 |
| | | | | glutamate ligase | | |
| murE | 225³ | HI1133 | 325 | UDP-N-acetylmuramyl-tripeptide | Yes | 0/96 |
| | | | | synthetase | | |
| murF | 225⁴ | HI1134 | 326 | UDP-MurNAc-pentapeptide synthetase | Yes | 0/96 |
| murG | 232 | HI1138 | 327 | UDP-N-acetylglucosamine-N- | Yes | 0/96 |
| | | | | acetylmuramyl-pyrophosphoryl UDP N- | | |
| | | | | acetylglucosamine transferase | | |
| murI | 237 | HI1739 | 328 | glutamate racemase | Yes | 0/96 |
| murZ | 242 | HI1081 | 329 | UDP-NAcGlu 1-carboxyvinyltransferase | Yes | 0/96 |
| nagA | 247 | HI0140 | 340 | N-acetylglucosamine-6P-deacetylase | Yes | 0/96 |
| pal | 252 | HI0381 | 341 | outer membrane protein p6 precursor | Yes | 0/96 |

¹Refers to the coding sequence present at each SEQ ID NO.
²Information obtained through the TIGR Haemophilus influenzae KW20 locus search page (www.tigr.org/tigr-scripts/CMR2/LocusNameSearch.spl?db=ghi).
³The murE coding sequence is nucleotides 936-2429 of SEQ ID NO: 225.
⁴The murF coding sequence is nucleotides 2443-3809 of SEQ ID NO: 225.

[0174] TABLE 4
Thirteen cell wall biosynthesis genes determined to be non-essential.

| | SEQ ID | | SEQ ID NO: of | | | No. of |
|---|---|---|---|---|---|---|
| Gene | NO:¹ | Locus² | polypeptide | Putative identification² | Essential | inserts |
| amiB | 150 | HI0066 | 308 | N-acetylmuramoyl-L alanine amidase | No | 3/96* |
| dacA | | HI0029 | 309 | penicillin-binding protein 5 | No | 22/48 |
| dacB | | HI1330 | 310 | penicillin-binding protein 4 | No | 3/48 |
| glmS | | HI0429 | 311 | glucosamine-fructose-6P-transferase | No | 28/48 |
| glnA | 185 | HI0865 | 315 | glutamine synthase | No | 5/48* |
| lpp | | HI1579 | 319 | lipoprotein PCP precursor | No | 22/48 |
| mepA | | HI0197 | 320 | penicillin-insensitive murein peptidase | No | 25/48 |
| mtgA | 200 | HI0831 | 318 | peptidoglycan transglycosylase | No | 5/48* |
| pbp2 | | HI0032 | 342 | penicillin-binding protein 2 | No | 6/48 |
| pbpG | | HI0364 | 316 | penicillin-binding protein 7 (putative) | No | 25/48 |
| ponA | 267 | HI0440 | 343 | penicillin-binding protein 1A | No | 36/96* |
| ponB | | HI1725 | 344 | penicillin-binding protein 1B | No | 16/48 |
| slt | | HI0829 | 317 | soluble lytic murein transglycosylase | No | 14/48 |

*exhibit a slow growth phenotype when insertion is present in the coding sequence.
¹Refers to the coding sequence present at each SEQ ID NO.
²Information obtained through the TIGR Haemophilus influenzae KW20 locus search page (www.tigr.org/tigr-scripts/CMR2/LocusNameSearch.spl?db=ghi).

[0175] Multiple insertions were found in amiB, dacA, dacB, glmS, glnA, lpp, mepA, mtgA, murG, pbp2, pbpg, ponA, ponB, and slt. Since the K primer sequence occurred upstream of the ATG start codon for dacA, dacB, glmS, lpp, mepA, mtgA, murG and pbpG, recombinants containing an insert from each gene were sequenced with a transposon primer to determine the exact location of the insert. All of the transposons inserted within the 5′ essential region except for murG; therefore dacA, dacB, glmS, lpp, mepA, mtgA, and pbpG are non-essential. Of the ten recombinants sequenced for murG, all ten contained insertions upstream of the ATG codon; therefore, murG was determined to be essential. Only one out of 96 recombinants screened for nagA contained an insertion. Sequence analysis mapped the transposon upstream of the ATG start codon, so nagA was also determined to be essential. The K/Z primer pairs for amiB, glnA, pbp2, ponA, ponB, and slt are within the 5′ coding region; therefore, these genes are non-essential. No insertions were found within alr, ddlB, ftsI, glmU, mraY, murB, murC, murD, murE, murF, murI, murZ and pal. Recombinant colonies were then′ re-screened with their N/C primer pair to identify inserts within the flanking regions. Inserts were found in,the flanking regions of all 13 genes; therefore, alr, ddlB, ftsI, glmU, mraY, murB, murC, murD, murE, murF, murI, murZ, and pal were determined to be essential.

Discussion

[0176] The genes necessary for the synthesis of peptidoglycan were essential (FIG. 60). The only step in the peptidoglycan biosynthesis pathway not assessed for essentiality is mrsA. The mrsA E. coli homolog (glmM) has been determined to be essential (Mengin-Lecreulx and van Heijenoort, J. Biol. Chem., 271, 32-39 (1996)). However, mrsA essentiality cannot currently be determined because H. influenzae has duplicated a segment of the chromosome that results in the presence of two identical copies of the mrsA gene. A transposon with a different antibiotic selectable marker will have to be constructed before the essentiality of mrsA can be determined.

[0177] Surprisingly, of the seven penicillin-binding proteins examined, only ftsI proved to be essential. FtsI has been shown to be essential in E. coli (Goffin et al., J. Bacteriol., 178, 5402-5409 (1996)), and the ftsI homolog in S. aureus (pbp-1) has also been shown to be essential (Wada and Watanabe, J. Bacteriol., 180, 2759-2765 (1998)).

[0178] Insertional inactivation of the cell wall genes presented several new technical challenges. As shown in FIG. 61, ftsI, murE, murF, mraY, murD, murG, murC, and ddlB are tightly clustered and have the same transcriptional directionality. It is likely that all eight genes are co-transcribed as a single operon. The established protocol for determining essentiality requires screening recombinants with the K/Z primer pair, followed by re-screening with the N/C primer pair for inserts in the flanking regions if no inserts are found in the 5′ essential region. However in this operon most flanking genes are also expected to be essential, so one would not expect to find inserts within the entire mutagenized PCR fragment. Distinguishing between failed mutagenesis and true essentiality relied on detecting inserts within the small number of bases between genes. For example, the ten murG recombinants containing insertions all mapped to the 9 bases between the stop codon of ftsW and the start codon of murG. For murC, four insertions mapped to the 67 base pair intergenic region between murG and murC.

[0179] The determination of the essentiality of murE and murF was particularly challenging. In this region of the biosynthetic operon there are only 9 bases in the intergenic region between ftsI and murE, 13 bases in the intergenic region between murE and murF, and no bases between murF and mraY as the TAA stop codon of murF overlaps with the ATG start codon of mraY (FIG. 62). The largest adjacent intergenic region occurs between mraY and murD (121 bases). N/C screening of this intergenic region for mraY and murD essentiality detected numerous insertions within this 121 bases. For the mutagenesis of murE and murF, N/C primers were designed to amplify a single 5.6 kb fragment beginning upstream of murE and ending downstream of the mraY/murD intergenic region. It was anticipated that no insertions would be detected during K/Z screening of murE and murF, but that N/C screening would detect insertions within the mraY/murD intergenic region confirming that mutagenesis had occurred. However, multiple insertions were detected when recombinants were screened with either the murE-K/murF-Z primer pair or the murF-K/mraY-Z primer pair. Sequencing of the insertions revealed that the 2 unique insertions detected with the murE-K/murF-Z primer pair all mapped to the 9 base intergenic region between murE and murF. The 4 unique insertions detected with the murF-K/mraY-Z primer pair all mapped to the last 32 bases of the murF gene. Therefore, murE and murF were determined to be essential. The mapping results with murF also provide additional evidence that insertions can occur in the C-terminal end of an essential gene.

[0180] One major concern with insertional inactivation is the possibility of polar effects on downstream genes contained within an operon. Our results with the cell wall biosynthetic operon provide numerous examples of the lack of polarity of the transposon insert. Colonies containing insertions in the conserved hypothetical protein upstream of ftsI, as well as in the intergenic regions between ftsI and murE, mraY and murD, murG and murC, and murC and ddlB were all viable. Mapping studies showed that in all cases the transposon had inserted with its kanamycin gene in the same transcriptional directional as the biosynthetic genes, suggesting that the kanamycin promoter was transcribing the downstream essential genes. Both the small size of the mini-transposon and the strength of the kanamycin promoter may help to compensate for polar effects.

### Example 4

### Rapid Transposon Insertional Inactivation for Determining Essentiality of Additional H. influenzae Coding Sequences Associated with Cell Wall Biosynthesis

[0181] The H. influenzae genome contains several regions of chromosomal duplication, and one such region encompasses mrsA (glmM in E. coli). MrsA is involved in the second step of the pathway, converting glucosamine-6-phosphate to glucosamine-1-phosphate, and is encoded by both HI1337 and HI1463. In order to determine the essentiality of mrsA, two strains were constructed containing a deletion of either the HI1337 or the HI1463 mrsA gene. Each deletion strain was then independently evaluated for the insertional inactivation of the remaining mrsA gene. In both strains, the second mrsA gene could not be insertionally inactivated; therefore mrsA is essential. A related cell wall biosynthesis study was undertaken to determine if the essential gene murI (glutamate racemase) could be insertionally inactivated in the presence of D-glutamate. MurI is essential in E. coli, but murI mutants auxotrophic for D-glutamate have been identified (Doublet et al., J. Bacteriol., 175, 2970-2979 (1993)). We were unable to generate H. influenzae murI mutants in the presence of D-glutamate suggesting that H. influenzae, unlike E. coli, does not transport D-glutamate.

Materials and Methods

[0182] Bacterial strains and growth conditions: H. influenzae Rd was obtained from the American Type Culture Collection as ATCC 51907 and grown in brain-heart infusion supplemented with 5% Fildes Enrichment (sBHI) at 37° C. in 5% CO₂. Plasmid pACYC 184 was purchased from New England Biolabs. D-glutamate (Sigma G-1001) was supplemented at 100 mg/ml. sBHI selection plates were supplemented with 1 mg/ml chloramphenicol (CM), 30 mg/ml kanamycin (KAN) or a combination of both CM and KAN.

[0183] Oligonucleotide synthesis: All of the oligonucleotides used in this report were synthesized by Genosys and are shown in FIG. 64.

[0184] Construction of the mrsA gene deletion fragment: The PCR amplification scheme used to construct the mrsA gene deletion fragment is outlined in FIG. 65. The deletion fragment, containing a replacement of the mrsA gene (FIG. 66) with the selectable marker for chloramphenicol resistance, was first synthesized in three segments. Segment A contains sequence upstream of mrsA amplified from primers A1 (500 bp upstream of mrsA) and primer A2 (an overlapping primer containing the 5′ end of mrsA fused to the 5′ end of the CM gene). Segment B amplifies the CM gene (FIG. 67) with primers B1 and B2 (containing overlapping extensions fused to the 5′ and 3′ ends of mrsA). Segment C contains sequence downstream of mrsA amplified from primers C1 (an overlapping primer containing the 3′ end of the CM gene fused to the 3′ end of mrsA) and primer C2 (1000 bp downstream of mrsA). Segments A and C were amplified from 1 mg of H. influenzae genomic DNA whereas the CM gene was amplified from the 10 ng of E. coli plasmid pACYC184 using Gibco BRL Platinum Taq polymerase as follows: 94° C. for 5 min (1 cycle);. 94° C. for 30 sec, 55° C. for 1 min and 72° C. for 1.5 mm (25 cycles); and 72° C. for 5 min. After amplification and gel purification, segments A and B were re-amplified into a single AB fragment by overlapping PCR using primers A1 and B2. Another round of overlapping PCR using primers A1 and C2 was then performed combining segment AB with segment C to produce a single mrsA deletion fragment ABC.

[0185] Chromosomal DNA isolation. Chromosomal DNA was isolated from strains 1337D and 1463D following the enclosed directions of the Qiagen DNeasy Tissue Kit.

[0186] Transposon mutagenesis and PCR colony screening: The protocols for Epicentre EZ::TN <KAN-2> mutagenesis, transformation into H. influenzae, and PCR screening of recombinant colonies was performed as described herein with the following modification: competent cells of 1337D and 1463D transformed with the mutagenized mrsA fragment were plated onto sBHI plates supplemented with CM and KAN.

Results

[0187] Determination of MrsA essentiality: Construction of the deletion strains began with transforming the mrsA deletion fragment ABC into competent cells of H. influenzae and plating onto sBHI supplemented with 1 mg/ml CM. Since segments A and C were synthesized from sequence contained within the duplicated chromosomal region, the mrsA deletion fragment could recombine at either the HI1337 or HI1463 mrsA coding sequence. Surviving colonies were first screened with primers 1337-N or 1463-N (unique sequences upstream of the duplicated mrsA chromosomal region) and primer CM-NR (the 5′ end of the CM coding sequence) to determine which mrsA coding sequence had undergone recombination. Of 16 colonies screened with the 1337-N/CM-NR primer set, 12 appeared to contain a deletion of the 1337 mrsA coding sequence. Of the 16 additional colonies screened with the 1463-N/CM-NR primer set, 5 appeared to contain a deletion of the 1463 mrsA coding sequence. Two colonies of each were purified and subjected to additional PCR analysis with primer sets 1337-C/CM-CR and 1463-C/CM-CR to confirm the presence of the 3′ end of the CM coding sequence, as well as primer sets 1337-N/mrsA-Z and 1463-N/mrsA-Z to confirm the absence of the respective mrsA coding sequence. One strain of each was selected and designated 1337D and 1463D.

[0188] The mrsA coding sequence, the flanking regions, and the PCR primer pairs are shown in FIG. 68. The PCR product was synthesized, mutagenized with the EZ::Tn <KAN-2> transposon, and transformed directly into competent cells of either 1337D or 1463D. To maintain the CM replacement of the deleted mrsA coding sequence and to select for the recombination of the remaining mrsA coding sequence, the transformants were plated onto sBHI plates supplemented with 1 mg/ml CM and 30 mg/ml KAN. Ninety-six colonies from each transformation were then screened with the mrsA essential region K/Z primer pair. No insertions in the remaining mrsA coding sequence were found in either 1337D or 1463D. Insertions were found, however, within the flanking regions; therefore, mrsA was determined to be essential.

[0189] To further demonstrate the ability of the mutagenized mrsA PCR product to recombine into the chromosome, the PCR product was transformed into wild type H. influenzae. Kanamycin resistant colonies were then screened for the presence of Tn insertions within one of the two mrsA coding sequences. Of the eight colonies screened with the mrsA KZ primer pair, four were found to contain two PCR products. The 439 bp band represented the KZ fragment with no Tn insert and the 1660 bp band represented the KZ fragment containing the 1221 bp transposon, indicating that within these four colonies one of the two mrsA coding sequences was insertionally inactivated. Additional PCR analysis showed that two of the colonies contained insertions in HI1337 and the remaining two colonies contained insertions in HI1463. All four colonies (1337::Tn#1, 1337::Tn#3, 1463::Tn#15 and 1463::Tn#19) were subsequently sequenced to confirm the insertion of the transposon within the identified mrsA-terminus (FIG. 69).

[0190] The N/C primer pair was then used on chromosomal DNA isolated from strains 1337::Tn#1 and 1463::Tn#19 to generate PCR products containing Tn insertions within each mrsA coding sequence. The PCR product from 1337::Tn#1 was used to transform 1463D, and the PCR product from 1463::Tn#19 was used to transform 1337D in an attempt to replace the remaining mrsA coding sequence with an insertionally inactivated mrsA coding sequence. Transformed cells were plated onto sBHI supplemented with 1 mg/ml CM and 30 mg/ml KAN. Of the ninety-six colonies screened from each transformation, none contained insertions within′ the remaining mrsA coding sequence. To confirm that the insertionally inactivated mrsA coding sequences could recombine into the chromosome, the 1337::Tn#1 and 1463::Tn#19 PCR products were individually transformed into wild type H. influenzae. Kanamycin resistant colonies were then screened for the presence of Tn insertions within the respective mrsA coding sequence. Of the 16 colonies screened from each transformation, all 16 contained insertions in the respective mrsA coding sequence. This provided final confirmation that phosphoglucosamine mutase is an essential enzymatic step in H. influenzae cell wall biosynthesis.

[0191] Insertional inactivation of murI in the presence of D-glutamate. In order to determine if insertionally inactivated murI mutants auxotrophic for D-glutamate could be obtained in H. influenzae, wild type H. influenzae was transformed with the Tn mutagenized murI PCR fragment and plated onto sBHI supplemented with mg/ml KAN and 100 mg/ml D-glutamate. Of the ninety-six colonies screened, none contained an insertion in murI. Therefore, H. influenzae murI mutants cannot be obtained by supplementing with D-glutamate. This finding suggests that H. influenzae is unable to take up D-glutamate.

### Example 5

### Identification of Essential and Non-Essential Ribosomal Genes in Haemophilus influenzae

[0192] Many antimicrobial compounds target the bacterial ribosome. This list includes the oxazolidinones, the macrolides, the aminoglycosides, the streptogramins, the tetracyclines, lincomycin, and chloramphenicol. Recently the 50S and 30S ribosomal subunits have been crystallized (Ramakrishnan et al., Cell, 108(4), 557-72 (2002)), thus making it possible to use structural design in the development of new anti-ribosomal compounds as well as improving known anti-ribosomal classes. To determine which ribosomal genes are essential in Haemophilus influenzae, the essentiality of all 58 H. influenzae ribosomal genes was systematically determined by targeted gene disruption. With this method, a PCR amplicon consisting of the target gene and flanking sequences is mutagenized in vitro using the EZ::TN <Kan-2> transposon and transformed directly into H. influenzae. Recombinant colonies are then screened by PCR for the presence of a transposon insert within the 5′ essential region of the target gene. If an insert is found, the gene is determined to be non-essential. If no inserts are found within the 5′ essential region but are found within the flanking sequences, then the gene is determined to be essential.

Materials and Methods

[0193] Bacterial strains and growth conditions: Haemophilus influenzae Rd was obtained from the American Type Culture Collection as ATCC 51907 and grown in brain-heart infusion supplemented with 5% Fildes Enrichment (sBHI) at 37° C. in 5% CO₂. Transformants were plated on sBHI supplemented with either 30 mg/ml kanamycin (Kan), 1 mg/ml chloramphenicol (Cm), or both (Kan/Cm).

[0194] Oligonucleotide synthesis: All of the oligonucleotides used in this report were synthesized by Genosys.

[0195] Tn mutagenesis and PCR colony screening: The protocols for Epicentre EZ::Tn <Kan-2> mutagenesis, transformation into H. influenzae, PCR screening of recombinant colonies, and sequence determination of the Tn insertion site are as described in the previous examples.

[0196] Gene deletion protocol: The protocol for deleting H. influenzae genes by replacement with an antibiotic resistance marker is as described in the previous examples.

[0197] PCR sequencing: PCR products synthesized with either the K/Z or N/C primer pairs were isolated using the Qiagen MinElute columns. One hundred nanograms of PCR product, 100 ng of Epicentre Kan-2 FP-1 transposon sequencing primer and sterile water to a final volume of 12 ml were added to a single tube and subjected to rough draft sequencing.

Results and Discussion

[0198] There are a total of 58 ribosomal genes in H. influenzae. The 30S ribosomal genes include rpsA, rpsB, rpsC, rpsD, rpsE, rpsF, rpsG, rpsH, rpsI, rpsJ, rpsK, rpsL, rpsM, rpsN, rpsO, rpsP, rpsQ, rpsR, rpsS, rpsT and rpsU. The 50S ribosomal genes include rplA, rplB, rplC, rplD, rpE, rplF, rplI, rplJ, rplK, rplL, rplM, rplN, rplO, rplP, rplQ, rplR, rplS, rplT, rplU, rplV, rplW, rplX, rplY, rpmA, rpmB, rpmC, rpmD, rpmE, rpmF, rpmG, rpmH, rpmI, and rpmJ. Three additional genes associated with ribosome assembly include rimK (probable 50S protein S6 modification protein), rimL (ribosomal protein alanine transferase) and prmA (50S ribosomal protein L11 methyltransferase).

[0199] All of the gene sequences, flanking regions and PCR primer pairs are shown in FIGS. 70-88. For each gene or group of genes, the PCR product was synthesized, mutagenized with the EZ::Tn <Kan-2> transposon, and transformed directly into H. influenzae. Kanamycin selected recombinants were then screened with their essential region K/Z primer pair. In Figures in which more than one K/Z primer pair is represented, the numbers in parenthesis after each K or Z primer designates the last three digits of the gene for which the primer is specific. For example, in FIG. 70, “K primer (204)” indicates this particular K primer is specific for HI0204 and “K primer (201)” indicates this particular K primer is specific for HI0210.

[0200] Twenty-one of the twenty-two 30S ribosomal genes were found to be essential. These results are summarized in Table 5. The only gene determined to be non-essential was a duplicate copy of the rpsO gene HI1468(S15). Five of the 33 genes associated with the 50S ribosome were insertionally inactivated: rplI, rpmA, rpmE, rpmF and rpmG. The remaining 28 genes were all essential. These results are summarized in Table 7. The three genes associated with ribosome assembly rimK, rimL and prmA were all insertionally inactivated; therefore all three genes are non-essential. These results are summarized in Table 6. These three strains have been designated HI11604623 (rimK::Tn), HI111633 (rimL::Tn), and HI11036389 (prmA::Tn).

[0201] To confirm the non-essentiality of the five 50S ribosomal subunit genes rplI, rpmA, rpmE, rpmF, and rpmG, the five genes were individually deleted by homologous recombination of a PCR product containing the chloramphenicol resistance gene substituted for the targeted gene. The five deletion strains have been designated HI0544D (rplI), HI0879D (rpmA), HI0758D (rpmE), HI0158D (rpmF) and HI0950D (rpmG). In addition, an attempt was made to construct double mutant strains of the 5 non-essential 50S ribosomal genes in all possible combinations. Three double mutants were successfully constructed. Strain HI1158544 contains a deletion of the rpmF gene and an insertional inactivation of the rplI gene. Strain HI158758 contains a deletion of the rpmF gene and an insertional inactivation of the rpmE gene. Strain HI758950 contains a deletion of the rpmE gene and an insertional inactivation of the rpmG gene.

[0202] As shown in Tables 5-7, we have determined that 9 of the 58 H. influenzae ribosomal genes are non-essential. This is in contrast to E. coli, where 18 of the 58 ribosomal genes are non-essential. These include rpS6, rpS9, rpS13, rpS17, rpS20, rpL1, rpL9, rpL11, rpL15, rpL19, rpL24, rpL27, rpL28, rpL29, rpL30, rpL33, and the 3 genes associated with ribosome assembly rimK, rimL and prmA (Table 8). Two genes that are essential in E. coli were shown in this report to be non-essential in H. influenzae: rplI (rpL9) and rpmF (rpL32). These results illustrate the importance of determining gene essentiality in a variety of organisms when selecting potential targets for broad spectrum antibiotic development as individual organisms can require different genes for bacterial survival.

[0203] A search of the H. influenzae genomic database for the ribosomal proteins revealed two genes encoding for the S15 ribosomal protein rpsO: HI1328 (see FIG. 86) and HI1468. A direct sequence comparison showed that both genes were identical at the nucleotide level, suggesting that a chromosomal duplication had occurred. A similar gene duplication was identified during the essential determination of the cell wall biosynthetic genes in Example 4, where identical mrsA genes were encoded by both HI1337 and HI1463. Insertional inactivation followed by the attempted deletion of the remaining mrsA gene showed that although each gene could be independently inactivated, mutants could not be constructed that inactivated both copies within the same cell. Therefore, the mrsA protein product itself is required for cell viability. Taking the same approach for rpsO, we tried to first insertionally inactivate HI1328 and HI1468. We readily isolated clones containing an insert in HI1468. However, we were unable to isolate any inserts in HI1328 suggesting that this gene is essential regardless of the presence of the duplicate copy. These results are shown in Table 7. A mutant was then constructed that contained a deletion of HI1468, but we were unable to construct a mutant containing a deletion of HI1328. Taken together, these results show that HI1468 is non-essential whereas HI1328 is essential.

[0204] The described methodology details the use of a single K/Z primer pair encompassing the 5′ end of the target gene for screening purposes. Due to the small size (<200 basepairs) of many of the ribosomal genes and their proximity to adjacent ribosomal genes, a single K!Z primer pair was designed to encompass the 5′ region of one-target gene through the 5′ region of an adjacent target gene. The following sets of ribosomal genes were screened with a single K/Z primer pair as shown in the accompanying figures: HI0516/HI0517 (FIG. 71); HI0776/HI0777 (FIG. 76); HI0778/HI0779[HI0780 (FIG. 76); HI0781/HI0782/HI0783 (FIG. 76); HI0784/HI0785/HI0786 (FIG. 76); HI0788/HI0789/HI0790 (FIG. 77); HI0791/HI0792/HI0793 (FIG. 77); HI0794/HI0795/HI0796/HI0797 (FIG. 77); HI0798.1/HI0799 (FIG. 78); HI1319/HI1320 (FIG. 85); and HI1442/HI1443 (FIG. 87).

[0205] Insertional inactivation of the ribosomal genes presented a technical challenge in that 26 of the genes are tightly clustered in a 15 kb segment and have the same transcriptional directionality. It is likely that these genes are co-transcribed in a limited number of operons. The established protocol for determining essentiality requires screening recombinants with the K/Z primer pair, followed by re-screening with the N/C primer pair for inserts in the flanking regions if no inserts are found in the 5′ essential region. However within this extended ribosomal operon the flanking genes are also expected to be essential, so one would not expect to find inserts within the entire mutagenized PCR fragment. Distinguishing between failed mutagenesis and true essentiality relied on amplifying large fragments containing multiple genes flanked by at least one region not containing any ribosomal gene and detecting inserts within this one flanking region. Genes HI0776-HI0786 were synthesized as a single 6.6 kb fragment with inserts detected in the N-terminal flanking region. Genes HI0788-HI0797 were also synthesized as a single 5.6 kb fragment with inserts again detected in the N-terminal region. Due to the large size of these mutagenized fragments in proportion to the K/Z fragment length for each individual targeted gene, 192 recombinant colonies were screened with the KJZ primer pair per gene as opposed to the standard 96 colonies.

[0206] Repeated attempts at synthesizing and mutagenizing the last five genes in this large operon, HI0798.1, HI0799, HI0800, HI0801 and HI0803, failed to detect inserts in the flanking regions. To determine the essentiality of these five genes, we used an alternate method of vector mutagenesis. With this technique, the target genes are synthesized individually as a PCR fragment, cloned into an E. coli vector and mutagenized with the EZ::Tn <KAN-2> transposon. Following transformation, individual colonies are screened with the target gene K/Z primer pair to identify vectors containing Tn inserts within this gene. Vector DNA is then isolated and used for PCR amplification with the original N/C primer pair to produce an amplicon containing a known insertion within the target gene. This fragment is then transformed into H. influenzae and kanamycin selected recombinants are screened by PCR with the K/Z primer pair for the presence of the original Tn insert. If no inserts are detected even though each transformed amplicon contained a Tn insert within the target gene sequence, then the gene is determined to be essential.

[0207] The target gene with flanking sequences was PCR amplified from 1 mg of H. influenzae genomic DNA with the N/C primer set following the Platinum Taq™ amplification protocol: 94° C. for 5 min (1 cycle); 94° C. for 30 sec, 55° C. for 1 min and 72° C. for 3 min (30 cycles); and 72° C. for 5 min (1 cycle). The resulting amplicon was cloned into the pScript vector following the enclosed directions of the Stratagene cloning kit and transformed into competent E. coli InvαF′ cells purchased from Invitrogen. Colonies were screened by restriction analysis to confirm the presence of the PCR insert. Vector DNA was isolated using columns purchased from Qiagen.

[0208] Following the package directions of the Epicentre EZ::Tn™<KAN-2> insertion kit, 100 ng of the vector was mutagenized for 2 hours at 37° C. After heat inactivation of the transposase at 70° C. for 10 minutes, 20 μl of sterile water was then added and the reaction was passed through a Millipore Ultrafree column to remove the enzyme. 20 ng of vector was then transformed directly into E. coli InvαF′ cells. Transformants were selected on Luria broth plates containing 30 μg/ml kanamycin. 48 colonies were screened with the respective K/Z primer pair to identify a vector containing a single insertion within each target gene. Vector DNA was isolated and the respective N/C primer pair was used to amplify the target gene containing the Tn insert within the gene. 100 ng of the PCR product was transformed into competent cells of H. influenzae and plated onto sBHI supplemented with 30 μg/ml kanamycin. After 48 hours of incubation at 37° C., all resulting colonies were screened with their respective K/Z primer pair to detect Tn inserts within the targeted gene. None were found in any of these five genes. Therefore, we concluded that HI0798.1, HI0799, HI0800, HI0801 and HI0803 are essential.

[0209] Ribosomal gene essentiality determined by the targeted gene disruption method of the present invention compared to ribosomal gene essentiality determined using a whole-genome approach reported by Akerley et al. (Proc. Natl. Acad. Sci. USA 99(2), 966-971 (2002)) is shown in Table 9. Thirty-nine genes were found to be essential and two genes were found to be non-essential by both methods. The results differed on six genes: rplL, rpsO (HI1468), rimI, rimK, prmA, and rpmE. The essentiality of the remaining 12 genes was not determined by the whole-genome approach. There are several benefits to identifying essential genes by targeted analysis. This approach generates a mutant library of individual clones that can be sequenced to determine the exact transposon insertion site, whereas results from genomic approaches are derived from mutant pools. The resulting individual clones are also available for further genetic analysis. Small genes (<300 bp) can be directly evaluated without relying on their proximity to anchoring PCR primers for accurate gel mapping. Targeted analysis also identifies insertionally inactivated genes whose protein product loss has a negative effect on the growth rate of the cell. The targeted approach is able to address the essentiality of cellular function when two or more genes encode f6r the same protein by using transposons with different selectable markers or by using insertional inactivation in combination. with gene deletion (i.e. rpsO encoded by both HI1328 and HI1468). Targeted analysis does sacrifice the overall speed of the genomic approach. However, the gains made in the accuracy of the data can offset the additional time required for essential determination.

[0210] Expanding on the above comparison of gene essentiality determined the targeted gene disruption method of the present invention to gene essentiality determined using the whole-genome approach reported by Akerley et al., the following genes were found to be essential by both methods: aroC, coaD, yrdC, IF-1, IF-2, IF-3, pth, tmk, alr, ddlB, ftsI, murC, murD, murE, murF, murG, nagA, emrB, pyrH, rpsA, rpsB, rpsC, rpsD, rpsE, rpsF, rpsG, rpsH, rpsI, rpsK, rpsL, rpsM, rpsN, rpsP, rpsQ, rpsR, rpsS, rplB, rplD, rplE, rplF, rplJ, rplK, rplM, rplN, rplO, rplP, rplQ, rplR, rplS, rplT, rplV, rplW, rplX, rplY, rpmC, rpmD, rpmH, rpmI, and dnaE. The following genes were determined to be essential by the targeted gene disruption method of the present invention, but were determined to be non-essential by the whole-genome approach of Akerley: fba, fmt, uppS, pal, rplL, cdsA, and coaE. The following genes have been determined to be essential by the targeted gene disruption method of the present invention, while essentiality has not been determined using the whole-genome approach of Akerley: ribB, ribF, nusA, glmU, mraY, murB, murZ, murI, rpS15 (HI1328), rpsJ, rpsT, rpsU, rplA, rplC, rplU, rpmB, rpmJ, and mesJ.

[0211] The comparison of non-essential ribosomal genes between E. coli and H. influenzae (Table 8) reveals many differences f6r these two closely related bacteria. Although ribosomal RNA and ribosomal proteins retain strong homology across species, accumulated subtle changes in the ribosome can collectively engender significant macromolecular structural differences in the ribosomes from different bacterial species.

[0212] Targeted gene disruption was used to determine the essentiality of the 58 ribosomal genes in H. influenzae. Forty-nine genes were found to be essential. The remaining 9 genes were found to be non-essential: rimI, rimK, prmA, rplI (rpL9), rpmA (rpL27), rpmE (rpL31), rpmF (rpL32), rpmG (rpL33), and the duplicate copy of rpsO (rpS15) encoded by HI1468.

[0213] (rpS)

TABLE 5
Essentiality results of the 30S ribosomal subunit genes

| | SEQ | | | | | |
|---|---|---|---|---|---|---|
| | ID | | SEQ ID NO: | | | No. of |
| Gene* | NO: | Locus | polypeptide | Function | Insertions | inserts |
| rpsA (rpS1) | 486 | HI1220 | 431 | 30S ribosomal subunit S1 | − | 0/96 |
| rpsB (rpS2) | 482 | HI0913 | 427 | 30S ribosomal subunit S2 | − | 0/96 |
| rpsC (rpS3) | 462 | HI0783 | 407 | 30S ribosomal subunit S3 | − | 0/96 |
| rpsD (rpS4) | 479 | HI0801 | 424 | 30S ribosomal subunit S4 | − | 0/10 |
| rpsE (rpS5) | 473 | HI0795 | 418 | 30S ribosomal subunit S5 | − | 0/96 |
| rpsF (rpS6) | 450 | HI0547 | 395 | 30S ribosomal subunit S6 | − | 0/96 |
| rpsG (rpS7) | 451 | HI0580 | 396 | 30S ribosomal subunit S7 | − | 0/96 |
| rpsH (rpS8) | 470 | HI0792 | 415 | 30S ribosomal subunit S8 | − | 0/96 |
| rpsI (rpS9) | 490 | HI1442 | 435 | 30S ribosomal subunit S9 | − | 0/96 |
| rpsJ (rpS10) | 455 | HI0776 | 400 | 30S ribosomal subunit S10 | − | 0/192 |
| rpsK (rpS11) | 478 | HI0800 | 423 | 30S ribosomal subunit S11 | − | 0/19 |
| rpsL (rpS12) | 452 | HI0581 | 397 | 30S ribosomal subunit S12 | − | 0/96 |
| rpsM (rpS13) | 477 | HI0799 | 422 | 30S ribosomal subunit S13 | − | 0/8 |
| rpsN (rpS14) | 469 | HI0791 | 414 | 30S ribosomal subunit S14 | − | 0/96 |
| rpsO (rpS15) | 489 | HI1328 | 434 | 30S ribosomal subunit S15 | − | 0/96 |
| rpsO (rpS15) | — | HI1468 | — | 30S ribosomal subunit S15 | + | 30/96 |
| rpsP (rpS16) | 445 | HI0204 | 390 | 30S ribosomal subunit S16 | − | 0/96 |
| rpsQ (rpS17) | 465 | HI0786 | 410 | 30S ribosomal subunit S17 | − | 0/192 |
| rpsR (rpS18) | 449 | HI0545 | 394 | 30S ribosomal subunit S18 | − | 0/96 |
| rpsS (rpS19) | 460 | HI0781 | 405 | 30S ribosomal subunit S19 | − | 0/192 |
| rpsT (rpS20) | 484 | HI0965 | 429 | 30S ribosomal subunit S20 | − | 0/96 |
| rpsU (rpS21) | 448 | HI0531 | 393 | 30S ribosomal subunit S21 | − | 0/96 |

The insertional inactivation results of the 22 genes associated with the 30S ribosomal unit. Twenty-one genes were determined to be essential; the only non-essential gene is the duplicate copy of the rspO HI1468.
*Alternative gene name is given in parenthesis.

[0214] TABLE 6
Essentiality results of associated ribosomal synthetic proteins

| | | | | No. of |
|---|---|---|---|---|
| Gene | Locus | Function | Insertions | inserts |
| rimK | HI1531 | 50S protein S6 modification | + | 8/48 |
| | | protein | | |
| rimI | HI0010 | ribosomal protein alanine | + | 6/48 |
| | | transferase | | |
| prmA | HI0879 | ribosomal protein L11 | + | 7/48 |
| | | methyltransferase | | |

The insertional inactivation results of the three proteins associated with ribosome synthesis. All three genes were determined to be non-essential.

[0215] TABLE 7
Essentiality results of the 50S ribosomal subunit genes

| | SEQ ID | | SEQ ID NO: | | | No. of |
|---|---|---|---|---|---|---|
| Gene | NO: | Locus | polypeptide | Function | Insertions | inserts |
| rplA (rpL1) | 446 | HI0516 | 391 | 50 S ribosomal protein L1 | − | 0/96 |
| rplB (rpL2) | 459 | HI0780 | 404 | 50 S ribosomal protein L2 | − | 0/192 |
| rplC (rpL3) | 456 | HI0777 | 401 | 50 S ribosomal protein L3 | − | 0/192 |
| rplD (rpL4) | 457 | HI0778 | 402 | 50 S ribosomal protein L4 | − | 0/192 |
| rplE (rpL5) | 468 | HI0790 | 413 | 50 S ribosomal protein L5 | − | 0/96 |
| rplF (rpL6) | 471 | HI0793 | 416 | 50 S ribosomal protein L6 | − | 0/96 |
| rplL (rpL7/L12) | 454 | HI0641 | 399 | 50 S ribosomal protein | − | 0/96 |
| | | | | L7/12 | | |
| rplI (rpL9) | — | HI0544 | — | 50 S ribosomal protein L9 | + | 8/48 |
| rplJ (rpL10) | 453 | HI0640 | 398 | 50 S ribosomal protein L10 | − | 0/96 |
| rplK (rpL11) | 447 | HI0517 | 392 | 50 S ribosomal protein L11 | − | 0/96 |
| rplM (rpL13) | 491 | HI1443 | 436 | 50 S ribosomal protein L13 | − | 0/96 |
| rplN (rpL14) | 466 | HI0788 | 411 | 50 S ribosomal protein L14 | − | 0/96 |
| rplO (rpL15) | 475 | HI0797 | 420 | 50 S ribosomal protein L15 | − | 0/96 |
| rplP (rpL16) | 463 | HI0784 | 408 | 50 S ribosomal protein L16 | − | 0/192 |
| rplQ (rpL17) | 480 | HI0803 | 425 | 50 S ribosomal protein L17 | − | 0/14 |
| rplR (rpL18) | 472 | HI0794 | 417 | 50 S ribosomal protein L18 | − | 0/96 |
| rplS (rpL19) | 444 | HI0201 | 389 | 50 S ribosomal protein L19 | − | 0/96 |
| rplT (rpL20) | 488 | HI1320 | 433 | 50 S ribosomal protein L20 | − | 0/96 |
| rplU (rpL21) | 481 | HI0880 | 426 | 50 S ribosomal protein L21 | − | 0/96 |
| rplV (rpL22) | 461 | HI0782 | 406 | 50 S ribosomal protein L22 | − | 0/192 |
| rplW (rpL23) | 458 | HI0779 | 403 | 50 S ribosomal protein L23 | − | 0/192 |
| rplX (rpL24) | 467 | HI0789 | 412 | 50 S ribosomal protein L24 | − | 0/96 |
| rplY (rpL25) | 492 | HI1630 | 437 | 50 S ribosomal protein L25 | − | 0/96 |
| rpmA (rpL27) | — | HI0879 | — | 50 S ribosomal protein L27 | + | 13/96 |
| rpmB (rpL28) | 483 | HI0951 | 428 | 50 S ribosomal protein L28 | − | 0/96 |
| rpmC (rpL29) | 464 | HI0785 | 409 | 50 S ribosomal protein L29 | − | 0/192 |
| rpmD (rpL30) | 474 | HI0796 | 419 | 50 S ribosomal protein L30 | − | 0/96 |
| rpmE (rpL31) | — | HI0758 | — | 50 S ribosomal protein L31 | + | 21/48 |
| rpmF (rpL32) | — | HI0158 | — | 50 S ribosomal protein L32 | + | 2/48 |
| rpmG (rpL33) | — | HI0950 | — | 50 S ribosomal protein L33 | + | 15/96 |
| rpmH (rpL34) | 485 | HI0998 | 430 | 50 S ribosomal protein L34 | − | 0/96 |
| rpmI (rpL35) | 487 | HI1319 | 432 | 50 S ribosomal protein L35 | − | 0/96 |
| rpmJ (rpL36) | 476 | HI0798.1 | 421 | 50 S ribosomal protein L36 | − | 0/96 |

The insertional inactivation results of the 33 proteins associated with the 50S ribosomal subunit. All but five were determined to be essential. Genes rplI, rpmA, rpmE, rpmF and rpmG are not essential.
*Alternative gene name is given in parenthesis.

[0216] TABLE 8
Comparison of the non-essential ribosomal genes of
H. influenzae and E. coli

| | Essential in | | |
|---|---|---|---|
| Gene | H. flu | Essential in E. coli | Reference |
| rpsF (rpS6)* | Yes | No | Dabbs¹ |
| rpsI (rpS9) | Yes | No | Dabbs² |
| rpsM (rpS13) | Yes | No | Dabbs¹ |
| rpsQ (rpS17) | Yes | No | Dabbs² |
| rpsT (rpS20) | Yes | No | Dabbs³ |
| rplA (rpL1) | Yes | No | Dabbs⁴ |
| rplI (rpL9) | No | Yes | This study |
| rplK (rpL11) | Yes | No | Stoffler⁵ |
| rplO (rpL15) | Yes | No | Lotti⁶ |
| rplS (rpL19) | Yes | No | Lotti⁶ |
| rplX (rpL24) | Yes | No | Herold⁷ |
| rpmA (rpL27) | No | No | Dabbs² |
| rpmB (rpL28) | Yes | No | Dabbs² |
| rpmC (rpL29) | Yes | No | Dabbs² |
| rpmD (rpL30) | Yes | No | Dabbs² |
| rpmE (rpL31) | No | Yes | This study |
| rpmF (rpL32) | No | Yes | This study |
| rpmG (rpL33) | No | No | Dabbs² |
| rimK | No | No | Kang et al.⁸ |
| rimI | No | No | Isono and Isono⁹ |
| prmA | No | No | Vanet et al.¹⁰ |

There are 9 non-essential genes in H. influenzae and 18 non-essential genes in E. coli.
*Alternative gene name is given in parenthesis.
¹Dabbs, Biochimie, 73: 639-645 (1991).
²Dabbs, J Bac, 140(2): 734-737 (1979).
³Dabbs, Mol Gen Genet, 192: 301-308 (1983).
⁴Dabbs, J Mol Biol, 149: 553-578 (1981).
⁵Stoffler et al., Mol Gen Genet, 181: 164-168 (1981).
⁶Lotti et al., Mol Gen Genet, 192: 295-300 (1983).
⁷Herold et al., Mol Gen Genet, 203: 281-287 (1986).
⁸Kang et al., Mol Gen Genet, 217: 281-288 (1989).
⁹Isono and Isono, Mol Gen Genet, 177: 645-651 (1980).
¹⁰Vanet et al., Mol Microbiol, 14(5): 947-958 (1994).

[0217] TABLE 9
Targeted gene disruption vs. whole genome analysis

| Targeted | Genomic | 58 Total | Genes |
|---|---|---|---|
| Essential | Essential | 39 | rpsA, rpsB, rpsC, rpsD, rpsE, |
| | | | rpsF, rpsG, rpsH, rpsI, rpsK, |
| | | | rpsL, rpsM rpsN, rpsP, rpsQ, |
| | | | rpsR, rpsS, rplB, rplD, rplE, |
| | | | rplF, rplJ, rplK, rplM, rplN, |
| | | | rplO, rplP, rplQ, rplR, rplS, |
| | | | rplT, rplV, rplW, rplX rplY, |
| | | | rpmC, rpmD, rpmH, rpmI |
| Non-essential | Non-essential | 1 | rplI |
| Essential | Non-essential | 1 | rplL |
| Non-essential | Essential | 5 | rpsO (HI1468), rimI, rimK, |
| | | | prmA, rpmE |
| Essential | Not | 9 | rpsO (HI1328), rpsJ, rpsT, |
| | Determined | | rpsU, rplA, rplC, rplU, rpmB, |
| | | | rpmJ |
| Non-essential | Not | 3 | rpmA, rpmF, rpmG |
| | Determined | | |

Comparison of ribosome essentiality as determined by targeted gene disruption verses whole-genome analysis.

### Example 6

### Evaluation of Essentiality of Additional H. influenzae Coding Sequences

[0218] This example demonstrates the essentiality of six additional H. influenzae coding sequence.

Materials and Methods

[0219] The materials and methods used are described in Example 1.

Results.

[0220] The following genes were subjected to insertional activation: dnaE (DNA polymerase III, alpha subunit), mesJ (cell cycle protein), cdsA (CDP-diglyceride synthetase), pyrH (uridylate kinase), coaA (dephosphocoenzyme A kinase) and emrB (multidrug resistance protein B). All of the gene sequences, flanking regions and PCR primer pairs are shown in FIG. 89-94. For each gene, the PCR product was synthesized, mutagenized with EZ::Tn<Tn>transposon, and transformed directly in H. influenzae. Kanamycin selected recombinants were screened with their essential region K/Z primer pair. The results are summarized in Table 10.

TABLE 10
Essentiality results for Example 6

| | | | SEQ ID NO: | | | |
|---|---|---|---|---|---|---|
| Gene | SEQ ID NO: | Locus | polypeptide | Function | Insertions | No. of inserts |
| dnaE | 494 | HI0739 | 439 | DNA polymerase III, alpha subunit | − | 0/96 |
| mesJ | 493 | HI0404 | 438 | Cell cycle protein | − | 0/96 |
| cdsA | 495 | HI0788 | 440 | CDP-diglyceride synthetase | − | 0/96 |
| pyrH | 498 | HI1065 | 443 | uridylate kinase | − | 0/96 |
| coaE | 496 | HI0890 | 441 | dephosphocoenzyme A kinase | − | 0/96 |
| emrB | 497 | HI0897 | 442 | multidrug resistance protein B | − | 0/96 |

### Example 7

### Cloning and Expression of an Essential Gene

Materials and Methods

[0221] Genomic Sequence and DNA. Sequence of H. influenzae imk was obtained from the GenBank database through the PubMed web interface, accession number NC_{—}000907. Genomic DNA from H. influenzae strain Rd (KW20) was obtained from American Type Culture Collection (ATCC 51907D).

[0222] PCR Protocol. PCR conditions were followed according to the Platinum PCR Enzyme System (GIBCO). 100 ng of genomic DNA was used with 200 nM primer concentration. Reactions were thermocycled in a GENEAMP PCR System 9700 (Perkin Elmer). Amplification was performed according to the following protocol: the reaction was incubated at 94° C. for 5 minutes, then cycled 30 times at 94° C. for 30 seconds (denaturation of DNA), 55° C. for 30 seconds (annealing of primers), and extension at 72° C. for 1 minute. The reaction finished with a final extension step performed at 72° C. for 30 minutes.

[0223] General Cloning Procedures. PCR products were ligated into pCR4-TOPO (Invitrogen) according to the manufacturer's protocol: 2-4 μL PCR product was mixed with 1 μL salt solution, 1 μL TOPO vector/enzyme solution, and 0-2 μL water to a final volume of 6 μL, and the reaction was incubated for 25-30 minutes at room temperature. Transformation was achieved by incubating 2 μL ligation mixture with 50 μL One Shot TOP10 cells on ice for 30 minutes, followed by heat shock at 42° C. for 45 seconds. After placing the cells on ice for 2 minutes, 250 μL SOC media was added, and the cells were incubated with shaking at 37° C. for 1 hour. Cells were spread on LB-Kanamycin (50 μg/mL) plates and incubated overnight at 37° C.

[0224] Overnight broth cultures (10 mL) of selected transformants underwent plasmid purification using the Qiagen QlAprep Spin Miniprep Kit. Plasmids exhibiting the proper restriction pattern were DNA sequenced to confirm nucleotide sequence of the insert.

[0225] The expression vector pET15b (Novagen) was digested with appropriate restriction enzymes and eletrophoresed in 0.8% SEAKEM GTG agarose (FMC Bioproducts). The appropriate bands were purified via the QIAEXII Gel Extraction Kit (Qiagen) and were ligated using T4 DNA ligase (Fermentas) and transformed via heat shock into TOP10 cells. Plasmids were purified and digested from selected atransformants to confirm proper ligation of insert into vector, and positive plasmid clones were transformed via heat shock into strains BL21 (DE3) and/or BL21 (DE3)pLysS (Novagen) according to manufacturer's instructions.

[0226] Cloning of Haemophilus influenzae tmk encoding a C-terminal hexahistidine tag. PCR was used to amplify tmk from Haemophilus influenzae strain Rd (KW20) genomic DNA (ATCC 51907D) as described in the general procedures above. Primers were designed to contain a 5′ NcoI and a 3′ BamHI site for cloning into the NcoI-BamHI sites of the expression vector pET15b. The 5′ primer used to clone H. influenzae tmk was also designed to encode a MGSS sequence at the N-terminus to improve efficiency of expression, while the 3′ primer was designed to encode a dual alanine linker segment followed by the hexahistidine encoding sequence (AAHHHHHH (residues 214-221 of SEQ ID NO:501)). Primer sequences were 5′-CCATGGGCAGCAGCAAAGGAAAGTTTA-TTGTCATTGAGGGC (N-terminal primer) (SEQ ID NO:502) and GGATCCTCAATGGTGATGGTGATGGTGAGCTGCTTTTTCGTTTGATTTCC A-CCAATTTTTTACCGCAC (C-terminal primer) (SEQ ID NO:503).

[0227] Expression. A single colony was picked from a fresh streak plate into NS86 seed medium containing ampicillin (100 μg/ml), grown to an absorbance of about 1 at 550 nanometers (˜1 A₅₅₀) at 30° C. and frozen ampules (20% glycerol was added as a cryoprotectant) prepared. Ampules were stored in the vapor phase of liquid nitrogen.

[0228] To prepare seeds, cells were grown in NS86 medium (2.6 g/l K₂HPO₄, 10.9 g/l NaNH₄HPO₄.4H₂O, 2.1 g/l citric acid, 0.67 g/l (NH₄)₂SO₄, 0.25 g/l MgSO₄.7H₂O, 10.4 g/l yeast extract and 5 g/l glycerol) containing ampicillin (100 μg/ml). Shake flask medium was MIM (32 g/l tryptone, 20 g/l yeast extract, 6 g/l Na₂HPO₄, 3 g/l KH₂PO₄, 0.5 g/l NaCl, and 1 g/l NH₄Cl) containing ampicillin (100 μg/ml).

[0229] Seeds were prepared by the inoculation of 0.1 ml thawed ampule-contents into 25 mls of NS86 medium and grown overnight at 30° C. Flasks (500 ml volume) containing 50 mls MIM medium were inoculated at 0.1 A₅₅₀. Cells were grown at 25° C. or 30° C. and induced at a density of ˜1 A₅₅₀ by the addition of IPTG.

[0230] SDS/PAGE analysis of culture samples was performed using the Laemmmeli procedure under reducing conditions. For Tmk titer estimation, 0.1 A-ml (where A-ml refers to A550 absorbance units per ml) cells pellets (lysed in sample buffer) were loaded; product was quantitated from the dried gels by densitometry using a Molecular Dynamics densitometer (Model 375A). Titer was estimated based on an external BSA standard (2 μg); specific expression level (% total cell protein, TCP) was calculated from the titer and the cell density using the conversion factors 1 A₅₅₀=0.26 g dry weight=0.14 g protein.

[0231] To assess soluble product, a 50 A-ml cell pellet was resuspended in 5 mls of cold PBS and the cells disrupted using a French Press. Following centrifugation (38, 700×g, 1 hour), a sample of the supernatant (soluble), as well as a sample of the unspun resuspension (total), were subjected to electrophoresis as described above. Densitometry on the dried gel provided a direct comparison of soluble to total product.

Results

[0232] PCR amplification of tmk genes was performed using genomic DNA template as indicated in Materials and Methods. PCR products were ligated into pCR4-TOPO and transformed into E. coli TOP10. Recombinant plasmids were purified from selected transformants and DNA sequenced for confirmation. DNA sequencing results and the corresponding amino acid sequence is show in FIG. 97. The tmk gene of correct sequence was then ligated into the NcoI-BamHI sites of the expression vector pET15b (FIG. 97). Clones were transformed into E. coli BL21 (DE3) and frozen stocks were prepared.

[0233] Expression of H. influenzae Tmk was evaluated at both 25° C. and 30° C. and induction with 0.1 or 1 mM final concentration of IPTG. Both temperature and IPTG level had a dramatic effect on the expression as shown in Table 11. The ‘control’ conditions, 30° C. and 1 mM IPTG, resulted in a product titer of 288 mg/l (36% of total cell protein). When cells were induced with 0.1 mM IPTG (30° C.) the Tmk titer increased ˜2.5 times and reached 50% of the total cell protein. Dropping the temperature to 25° C. (0.1 mM IPTG resulted in titers that were ˜2 times that of the control (˜38% of total cell protein). Under all conditions, the Tmk was expressed exclusively in the soluble form.

TABLE 11
Effect of Temperature and IPTG Level on Tmk Expression

| Product | HiTmk 6XCT¹ | | |
|---|---|---|---|
| Temperature | 30° C. | 30° C. | 25° C. |
| IPTG (mM) | 1 | 0.1 | 0.1 |
| Titer (mg/l) | 288 | 749 | 528 |
| % TCP² | 36.6 | 50.4 | 38.0 |
| % Soluble | 100 | 100 | 100 |

¹HiTmk 6XCT; H. influenzae Tmk protein modified to encode a hexahistidine tag at the C-teminus of the protein.
²% of total cell protein

[0234] The complete disclosure of all patents, patent applications, and publications, and electronically available material (e.g., GenBank amino acid and nucleotide sequence submissions, and computer programs) cited herein are incorporated by reference. The foregoing detailed description and examples have been given for clarity of understanding only. No unnecessary limitations are to be understood therefrom. The invention is not limited to the exact details shown and described, for variations obvious to one skilled in the art will be included within the invention defined by the claims.

[0235] All headings are for the convenience of the reader and should not be used to limit the meaning of the text that follows the heading, unless so specified.

The application's sequence listing, which the Patent Office published only in electronic form, follows.

SEQUENCE LISTING (621 sequences)

SEQ ID NO: 1 - DNA, 2925 bp, ARTIFICIAL
  Sequence of the galK coding sequence and flanking regions.
attgccattattgaccgcacttgagattgaagaagtgattaaagtatggcaggaacaacttcgtgagcttggtgcgaaataccaatgggtgcaaatttttgaaaacaaaggggcagcaatggggtgttcgaacccacatccacatggtcaaatttgggcgaatagtttcttgccaaatgaagttgctcgtgaagatcgtacacaacgtgattatttgctaaaacatggctcagtaatgttggttgattatgtaaaacgagaattggcgttgaaagaacgtattgtcgttgaaactgaacattggatcgctttagtgccttattgggctatttggccatttgaaacattgcttttaccaaaaactcatgtaaaacgtttaactgaattaagtgacgaacaatcaaaagatcttgcggttattttgaaaaaattgacgactaaatacgacaatctctttgaaacctctttcccatattcaatgggatttcatgcggcaccgtttaatggagaagataacgaacattggcagctacatgctcatttttaccctcctcttttgcgttcagcaaccgtgcgtaaatttatggtgggatatgaaatgttaggcgaaaaccaacgtgatttaacggcagaacaggcagcagagcgattacgtgctttgagtgaagttcattataaagaaagaactaaataatatagtcagtctccctctttagctttagcaaagaggggtgcagatcgagtatagatttaatataaaggatagaaatatgaccccaatccaaaatgctcaacaaattttcaatagacagcataaaaatttgccagaaattaccgtctatgcgcctggcagagtaaatatcatcggcgaacataccgacaacaaggtgcaaatttagtgatttctggtaatgtgccgctttcttctggattaagttcatctgcagcgttagaagttgcggtgggtaaattctgccaacaacttggcgatttaccgctttctcacacggatattgcattgaatgggcaaaaggctgaaaaccaatttgtcggtgctaattgtggcaatatggatcagttaatttccgcacttgggcaggaaaatcacttactgatgatcgattgtcgtagtcttgaaaccacgccaacaccagtgccacaagatgtcgcctacaacgacggctttgttatgccttgcgcaattaattttggtacggccgtttctggtacaaaacgagatgatcatatttggaatgtttatgctgcagatcttgatgaaactgatgaattttctctcaatgttgaaattcctaagagtgaacacaaatgggctaattacgtgcgtggggtggtaaaatttatccaagaacgttacccagattttcgtgattattgtgaattcaaacgtaccgcacgatttagtaacaggcgaatacaatactcgccgtcagcaatgtgaagaggcagcaaaattttttggcgtgaaagcattacgagatgtttcagttgagcaattccaaaaaagagaagcggaattgaccgcactttctccgttagcagcaaaacgtgctcgtcatgtcgtaacagaaaatcaacgagtacttgatgcagtggaagcattgaagaacaatgatttgacttgtttaggtaaactaatggaagcatctcacgattcaatgcgtgatgattttgaaatcaccgtgccacaaattgattatttagttgaattggctcaacttgttattggcaaaagtggcggtgcacgtatgacgggcggcggttttggtggctgtattgtcgcacttgcaccgcatgataaagtcgattcagttcgtaaaattattgcggataattacgagaaaacgactggtttaaaagaaactttttatgtgtgtaccgcatcacaaggtgttcgagtgatttaagagaaaataatgttagaacaaaccacttttaatgcgcctgatggtgcaccttatcagcttataaccctgcaaaatgaaaatgggatgcgtgttcaatttatggattggggcgcaacttggctttcttgtaaagtgccagtaaatgacacattacgcgaggttttattgggttgtaaggtagataattatcccactcatcaaagctatttaggcgcaagcgtagggcgttatgcaaatcgtattgcaaatgcacaatttgaattgaatggcgaacttattaaattaagtagtaatcaaggtaaacatcagcttcatggtggagagggctttgataaacgccgttggaacattcaagagtgcggtgagaattttgtgtgtttttcattacattcagtggatggtgatcaaggttttcctggtaatgtggatgtgtctgtaacctatacgctaacaggtgataatagcgtaaaaattgaatatgcagggatgtgcgataaggatactgcattgaacctaacgaatcatacttatttcaatttagaaaatgcagagcaaggcagtgacgtgcgtgaacatacattacgtttaaatgctgatttttatctgcctgtagataatgaggggattcctaattctccattaaagcacgtggtgaatacaagttttgacttccgtattgctaaacccatcaagcaagattttttacaaggggatcagcaagcaacaaagggttacgatcattcctttattgtcaataaagcttggcaaaagccttgtgtgttactaacctctccaactggcgatttaagtttggaagtaagaacctcgcaagctgcattgcaggtttatacgggtaattatcttgcaggtacaccaacgagaaatggcgaattatatgccgatttttctggcatagcactagaaactcaatgtttaccagatacgccaaatcatcctgaatggcaaaattacggcggaattcaaaaagcaggcgggcgat

SEQ ID NO: 2 - DNA, 20 bp, ARTIFICIAL
  Primer
gaacaacttcgtgagcttgg

SEQ ID NO: 3 - DNA, 20 bp, ARTIFICIAL
  Primer
gccagttggagaggttagta

SEQ ID NO: 4 - DNA, 20 bp, ARTIFICIAL
  Primer
aattaccgtctatgcgcctg

SEQ ID NO: 5 - DNA, 20 bp, ARTIFICIAL
  Primer
caccgcaacttctaacgctg

SEQ ID NO: 6 - DNA, 2696 bp, ARTIFICIAL
  Sequence of the tmk coding sequence and flanking regions.
gcgtggcgagtttttcttattacaaaatgactgaatttgtaaaaacaccagtaaatgtgcaggcagatgaacttttaacgattgaacgtggcacaacaagttcaaaattagccacactttttgagcaagaaaagttaattgctgatgggaaattattaccttatttgctgaagttgaaacctgagttaaataaaataaaagcagggacttattctcttgagaatgttaaaactgtgcaagatttactggatttgctcaattccggtaaagaagtgcagttcaatgtaaaatggattgaaggaaaaacctttaaagattggcgaaaagatcttgaaaatgcaccgcacttggtgcaaaccttgaaagataagagtaacgaagaaattttcgcattacttgatttgcctgatattggtcaaaatcttgaactaaaaaatgtggaaggttggctttatcctgatacttataactatacgcctaaatcgacagacttagagctacttaagcgatcggctgagcgaatgaaaaaggcgttaaataaggcttggaacgagcgtgacgaggatttacctttagcgaatccttatgaaatgttgattttggcttctatcgtggaaaaagaaacgggtattgctaatgagagggcaaaagtggcatctgtatttatcaaccgtttaaaagcaaaaatgaaattacaaacggatccaacggtaatttatggtatgggcgaaaattacaatgggaatattcgcaaaaaagatttagaaaccaagacgccttataatacgtatgtgattgatggattgccgccaacgcctattgctatgccaagtgaaagttcgttacaggctgttgcgaaccctgaaaaaacagatttttattattttgtagcagatggttctggtgggcataaatttacccgaaatttgaatgaacataacaaagcggtgcaagaatatttacgttggtatcgcagtcagaaaaatgccaaataaaagtgcggaagaaaatatgaaaggaaagtttattgtcattgagggcttagaaggtgcggggaaaagctccgctcatcagtctgtagtgcgagttttgcatgaacttggtattcaagatgttgtgtttacgcgcgagcctggtggaacgccactggctgagaaattacgtcatctcatcaaacatgaaaccgaagaacccgtgacagataaagcagagttattaatgctttatgcggctcgtattcagttggtggaaaatgtgattaaacctgctttaatgcaagggaaatgggtagtgggcgatcgtcacgatatgtcatctcaggcgtatcagggtggtggacgtcaattagacccgcattttatgctcaccttgaaagaaaccgtattaggtaattttgagccagatctcacaatttatttggatatagatccgagcgtcggtttagcgcgagctcgtggacgtggcgagttagatcgtattgagcaaatggatttagattttttccatcgtactcgagcacgctatttagaattagtaaaagataatcccaaagcagtggtgattaatgcagagcagagtattgaacttgttcaagctgatattgaaagtgcggtaaaaaattggtggaaatcaaacgaaaaatgaccgcactttacccttggctaatgccaatttatcatcaaattgctcaaacctttgacgaagggttggggcatcatgctgtgctgattaaagctgattctggtttaggcgtagagagtttatttaatgcacttgcacagaaaataatgtgtgtagctcaaggcgataaaccttgtggtcaatgccattcttgtcatttaatgcaagcccatagccatccagattatcacgaattaagccccattaacggtaaggatattggcgttgatcaagtacgcgacattaatgaaatggttgcgcagcacgcacaacaaaacggcaataaagtggtgtatgtgcaaggggcggaacgtttaacggaagcggctgctaatgcattattgaaaacattggaagagcctcgtccaaatacttattttttacttcaagcggatagttcggcaagtttgttagcaactatttacagtcgatgccaagtgtggaatctttccgtgcctaatgaagaaattgcttttgaatggttaaaatcaaaaagtgcggtagaaaatcaggaaattttgaccgcacttgcgatgaatcttgggcgtccgcttttagcattagaaacgttacaagaaggatttattgaacagcgtaaaaacttcttacgtcaattttgggtgttctatcgccgacgttcgccattggaattgcttccgttgtttgataaagaacgctatgttcagcaagtggattggattttggcttttctttctgattgtttaaaacataaacttgaaattgatagtcatcgacaagtggctgatcttggccgtggtatcgaacaattcagcgacgagcaaactgcccttggtttattacaagccattaaaattatgcaaaaagtgcggtcagatttgcttacaattaatggtgtgaatgttgaattaatgctattggatggcttgacacgattagtcacagaagtatttgaaacgcaataaattaaagatatatcgtctatggcgttcaagccttaggcataaggaaaaataattatgttcattgttgactcc

SEQ ID NO: 7 - DNA, 20 bp, ARTIFICIAL
  Primer
acgattgaacgtggcacaac

SEQ ID NO: 8 - DNA, 20 bp, ARTIFICIAL
  Primer
gcttgaacgccatagacgat

SEQ ID NO: 9 - DNA, 20 bp, ARTIFICIAL
  Primer
cgttggtatcgcagtcagaa

SEQ ID NO: 10 - DNA, 20 bp, ARTIFICIAL
  Primer
atctaactcgccacgtccac

SEQ ID NO: 11 - DNA, 2924 bp, ARTIFICIAL
  Sequence of the aroC coding sequence and flanking regions.
acactttggcaacaaaccacgacaaccgatgctggcactgtaatggaaagcattactttatttaatcttcttgttgctttggttatcgtaggaattacttatgtgttggttcgtaatatttcaggcattttggaagtattaattttttctcgcgtgaatctttcacaaggtacgccttatacgattacgacactacttacttatatttttatcgccattggtggtgcgtgggcatttgcaaccttagggatgtcttggtcaaaattacaatggttattcgccgcactttctgttggtcttggttttggtatgcaagagatttttgcaaactttgtgtcaggtatcattttgttatttgaacgcccaatccgagttggcgatgtggttaccattaatgaagtgagcggtactgtagcgaaaattcgtatccgtgcaattacattgattgattttgatcgcaaagaagtgattgtgccaaataaatcttttgtgactggtcaagtgaccaactgggcattatctaacactatgacacgtttagtgattagcgttggtgttgcttatggttctgatttaacactcgtgcgccaattattacttcaagcagctgatgaacaaccgactattttacgcgatcctaaaccatctgcttattttttaacttttggtgcaagtacactggatcacgagttacgtgtttatgtagaacaagttggggatcgcaccagtactacagatgcccttaatcgccgtattaatgaattatttgcagaacataatattgatattgcctttaatcaattagatgtatttatcaaaaataatgatacaggcgaagaaattccttttgttgatgtaaaaaaataagggcaaattatggctggtaatacaattggacaacttttccgtgtgacaacctttggagagtcacatggtattgcattaggctgtatcgttgatggcgtgccaccaaatctcgaattatccgagaaagatattcagccagatttagatcgtcgtaaaccaggaacatctcgatatacgacgcctcgtcgtgaagatgacgaagttcaaattttatctggtgtgtttgaaggaaaaaccacaggcacaagtattgggatgatcattaaaaatggagatcagcgttcgcaagattatggtgacattaaagatcgtttccgcccaggtcatgcggattttacctatcagcaaaagtatggaatccgtgattatcgtggcggtgggcgttcgtcagcacgtgaaacagcgatgcgggttgctgcaggggctattgcgaaaaaatatttacgcgaacattttggcattgaggtgcgaggttttttaagccaaatcggtaatataaaaattgctccgcagaaagtgggacaaattgattgggaaaaggtaaacagtaatccattcttttgtcctgatgaaagtgcggtagaaaaattcgatgaattgatccgtgaacttaaaaaagaaggagattctattggcgcaaaacttactgttattgcagaaaatgtacctgtaggattgggcgagccagtatttgaccgtttagatgccgatcttgctcacgcattaatgggaattaatgcagtaaaaggtgtagaaattggcgatggctttgctgtggttgaacaacgaggttcggaacatcgtgatgaaatgacacctaatggctttgaaagtaatcatgcaggcggtattttaggcggaattagttcaggacaaccaattatcgccactattgcactaaaaccaacttcaagcattacgattcctggtcgttcaatcaatcttaatggtgaagccgtagaagttgtaacaaaaggtcgtcacgatccttgtgtggggattcgtgctgtgccaattgcggaagctatggtggcgattgtcttattagatcatctcttacgttttaaggcacagtgtaaataatcctgtacctagggtagtatactctaggttagttcttcaataggactgaacctaggatatacttacctacagcaaaactttagaatgaataaaattttattaaaaacaaccataatttttaccgcacttttctctctgaacgttgttgcgtctcctctagattggcaaaaagtgaaacgccctattccaagtgaagatggtaaagcaagtcctattggtagttataccaacgggtgtattattggagcacaagcattaccgccgaaaggtgaaggttaccaagtgattcgcatgaatcgcaatcgttattatggtcatccaaatatgattcagtatcttgaacgtttggggcagcgagctaaagctgctgggttgccaacgatgttagtaggcgatattgccatgcccggtggtgggcggtttttaacgggtcatgctagccatcagatgggattagatgcggatatttggttaagaatgggcgaaatgtcagatgccgatgcgctcaattctgatggtaaaggtttattagttgtggatagaaaggcgcaacgagtagatgagcgcgtgtggaatagcaatcatgcgacgttaatcaagttagctgcgcaagatccaaatgtgacgcgtatttttgttaatcctgcgattaaggtaaaattatgtcaaaccgctggcaatgatcgcggttggctacacaaaattcgtccttggcatggacacaactctcattttcatgttcgtttaacttgcccagcagatgcatcttattgtgaaaatcaagcgcctgtgcctgctggtgatggttgtggagacgaattatattcttggtttgaaccgccaaaaccaggcacttcagtgagcaaacctaaagttacaccgcctgagccgtttttgtgccaacagattttgaactcaccgaatcggagagaatggttagaatagcattgaggtaaatcaatatggatatcggc

SEQ ID NO: 12 - DNA, 20 bp, ARTIFICIAL
  Primer
aaccacgacaaccgatgctg

SEQ ID NO: 13 - DNA, 20 bp, ARTIFICIAL
  Primer
ggagagtcacatggtattgc

SEQ ID NO: 14 - DNA, 20 bp, ARTIFICIAL
  Primer
acctcgttgttcaaccacag

SEQ ID NO: 15 - DNA, 20 bp, ARTIFICIAL
  Primer
ccattctctccgattcggtg

SEQ ID NO: 16 - DNA, 2519 bp, ARTIFICIAL
  Sequence of the coaD coding sequence and flanking regions.
caaacgagggaaatcatcgcgtaaacgcaccatattttctggtcgtgcgccacgccacgaataaatagattggtcatcatcgcccaccacagtgaaacaagcacgatcacccactaaaagtttaatcagttcatattgactggtattggtatcttgatattcatccaccaacaaataacgaatttttgcctgccattttgaccgcacttcttcattttgcttgaacaacaacgtcggaagcataatcaaatcatcaaaatcaagagcattgtaagttcgaatttgtgtggcgtaacgttcataacattttgcgaaagtttgatatttagcatcacgcgccaacgcaaacgcctgttttggcgaaatcaaatcattcttccagttagaaatcactgaaattaactcgcgcaataaatccttatcttcttttaacacatcagcggttagctcttttaacaacgcaaattgatcgtgctcatcaaacaaggtcatatttgatttaaagcccaacgctttatattcacgcttaagaatgtcaaaaccgagcgtatgaaaagtggaaacaagcaagcctttagattgttctttgccaatggaatgtgccacacgctctttcatctcgcgtgcggctttattggtaaaagtgacggcggcaatttgtttcggagaataaccgcacttttcaattaaatgggcgattttattaatgattacgcgagttttgccagagcctgcaccagcaagcacaagacaaggacctgtcacatattcaacggcttgttgttgttgaggattgagtttcataagaattattgagcccacgcatagggcagtaatacagtgtctaataaaaatgagagaggcaaatctaagattggcaatccccattgttgcgccatttcaagatcataagcaacccctgcataggcggtatatttttctgttggatcgataagtttgaccacggaaccacaaccagataaaacgataagtgcggttaaaaaaataaagatttttatcatcgtgcttttaacgcattgaacacaggcacaggaactagctcagcgacatcaccgccatgcaaataaatttcacgcacaatggtggaagaaacaaacgcccatttttctgctggtgggaaaaacagactgtctacgccttttgtgagtaaacgattaagggcagccaattgcagttcatattcaaaatctgttgttgtgcgtacgccacgaataatagcggaaatattgtgctgtttaatcacatttgccaacaaatcagaaaagccaaacacttccacattggataaatgcacaacagattgacgaacaagttctacgcgttcctccaaagaaaatagtggctttttacttgggctattcgccaccgccactaaaacacgaggaaaaattaccgcacttctttcaataatgtctaaatgaccgttcgtaatcggatcaaaagtaccaggataaatcacgctcgtcatacattgcgctccaaataaggttttaataaatctaacaaacgctgtaatgcccctcggttttccatcagcacttcatagccagcattacctaaacgttcgcgggattcttttgagtttaataaggcttctacggcgcgttctaaggcatctgcggttgaattaacttccaacacaccttgcacttctaccagcattcgaaatatctcgggaaaattgaaagtatgcttgccagtaatcactggcattttaaatgcaagaggttctaaaggattatgccccccgtgtttcacaaggcttccacccacaaaagcaatatcggaaatgccatacatcaacatcaattcgcccatactatcgcccaaaatcacttgggtattttcatttggtaattcatttgtggagcgacgaataaattgaaatttttcctttttaagtaaatcagccaccacattaaaacgctctggatggcgaggaacgagcaataacaataaatttgggtattttgctaacaaagcgcggtgagattttaaaatgatttcatcttctccattatgcgtgctggcagcaatccatattgggcgatcttgtttccaaagggtgcgcaatgaatcaattttacgtaatagttcatcattcgtattgagatcatatttaatattgcccgtgatattcaatttttcctttggatagcccaaagtggcatagcgttttccactaatgttatcctgcgctgcaatcaagctaatttgtgaccacattgtttgtaagtgcgcttttatttttccgtaacgatgcgcagaacgcgcagataaacgtgcattagcgataacaaatggaatattgcgtaaaaataattgatgaataagattaggccaaagttctgtttccatcacgatacataatttaggttgtacaaaattaataaaacgatggatcgaaaaaggtaaatcaagggggagataataatgaaaaacactatctccaaaagtggctttgacgcgctctgaacctgtgggcgtaaaagtcgtaa

SEQ ID NO: 17 - DNA, 20 bp, ARTIFICIAL
  Primer
gtcatcatcgcccaccacag

SEQ ID NO: 18 - DNA, 20 bp, ARTIFICIAL
  Primer
tgatggaaacagaactttgg

SEQ ID NO: 19 - DNA, 20 bp, ARTIFICIAL
  Primer
ggaactagctcagcgacatc

SEQ ID NO: 20 - DNA, 20 bp, ARTIFICIAL
  Primer
ttagtggcggtggcgaatag

SEQ ID NO: 21 - DNA, 3268 bp, ARTIFICIAL
  Sequence of the rhlB coding sequence and flanking regions.
atatcgccgcttattttttatgggaaattatatgacttatattgttggcttaactggtggcattggtagtggtaaaacaacgattgctaatttatttaccgatcttggcgtacctctagtggatgcggatgtggttgctagagaagtcgtcgcgaaagattcccccttattgtcaaaaattgttgaacattttggggctcaaattttaacggaacaaggcgagcttaatcgcgcggctttacgagagcgagtgtttaaccatgatgaagataaattgtggttaaataaccttctacatcccgctattcgtgaacgaatgaaacaaaaattagctgaacaaactgcgccttacacattatttgtcgtccctttattaatagaaaataaattgaccgcactttgtgatcgtattttggtggtggatgtgagtccacaaactcaacttgctcgttcagctcaacgagataacaataattttgaacaaattcaacgaattatgaattctcaagtttctcaacaagagcgtttgaaatgggcggatgatgtgattaataatgatgctgaactggcccaaaacttaccgcacttgcagcaaaaggtgctagaattgcaccagttttatttacaacaagcggaaaataaaaatgcctgacgaaatgattgaagtaccttgtccgatttgccaaaaatcggtgccttggataaatgaaagtacttttcgacctttttgtagcaaacgttgccagttaattgatcttggcgaatgggcggctgaagaaaaagcgattccaagtgatactgctgattttgcaatggatccaaatgtgagtgacgaatggagcattaaatagagattaaccgataggaaaccctatcggttaatttttataagtgcggtgctttttttgaggatttttcctaaaaatgctatgctaaacgtaattttattattctaaaatgtgatttttatgcaacaagattatttaagccaacaacgattctccgctcttcctctacacccgattgtgcgaggtgctttggcaaaaaaaggctttgatttttgtaccccaattcaggctttatccttgcctatcagtttaaatggacgagatgtcgcaggacaagctcaaactggtacaggcaagacaatggcttttttaacggctacttttcaccatcttttaactcaccaagatcctaatcttaaatatcctcacccaagagctttgattttagcacctactcgagaattagcggtacagattagtaatgacgcagaatttcttgcaaaagcgagtggattaaagaccgcacttgcctatggtggcgatggttatgataaacaactacaagcgattgagcgtggcgtcgatattttgattggtacgacggggcgagtcattgattatgtgaaacaaggcgtaattggtttagatgaaatccaagttgtcgtgctagatgaagcagatcgaatgtttgatcttgggtttatccgtgatattcgttatttattgcgtaaatgccccgctccgcaagctcgtttaacgatgttattttcagcgacgctttcttataaagtgcgtgaattagcatttgaagatatgaatgaacctgaatatattgaaattgaaccagaacaaaaaacagggcaccgaattaaagaagaacttttttatccatctaatcaggataaaatggcacttctcttaaccttaatggaagatgaatggcctgaacgctgtattgtatttgcgaatacgaaacatcgttgtgaagaaatttggggctatttggcggctgatgggcatcgtgtcggtttactgactggcgatgtagcacagaaaaaacgtttatcgttattaaaacaatttactgatggtgatttggatattttagtggcaacagatgtggctgctcgtggcttgcatatttctgatgtgacgcatgttttcaattatgatttacccgatgatcgagaagattatgttcaccgaattgggcgtactggacgagcaggggaaagtggtgtttcgattagtttcgcttgtgaagaatatgcgatgaatttaccagcaattgaagaatatattggccattctatccctgtgagccaatatgaaacagaagccttgcttgaactgccgaaaccgtatcggttgaaacgtgcggtgccaccgcaaggacatacaagacatcgttcttatcacgcaaaataggtgggcttcagtccacgcgtttatttaatgatgaaaagtgcggttaattttgactgcattttatattcctattttttatatcctactttgttcatcattcatcttgtgggtttacggcttacctacagataagtattgttacgttttttgttttttaacttgccaaaaaacaaaaaataaataaaatgaacgctcattcatttttgagcaattattgctccttattttactcaaggatcttatgcgacaagctaaaacagacttagctgaacagattttttcagcgacagatcgtttaatggcaagagaagggttgaatcaactttctatgctcaaacttgcgaaagaagcaaatgtagccgcaggaacgatttacctttattttaaaaacaaagatgaattgcttgaacaatttgcacacagagtgttttcaatgtttatggcaacacttgaaaaagattttgatgaaactaagccttttttcgaacagtatcgacaaatgtggaaaaacatttggtatttcttacaagaaaatcccactattctatccaatttaaagcaatatgaatctttgccgaatttcaaggatatttgtaaaaacattaaaaattgccgttgggatttattttgtcatcaagcacaaaaagctggcttattagcggaattatctgaagatattctctttttattaagtttgaaaacggcgataaatttagcctctgatgcaaaatttatcgatttcgatcttaagcctgaaattttagaatctgtgattgaacgctcttggcgtgcgattcagaaataattgttgttatttttataacggagctttaaacatgagtcaaactcaacatcaaagaccaaaacgctcacatattttcttgatgaaaataattttagtggtatttgtcttaatttttgtcggtgtcatcggttttaatatgataaaaggcgtaatgataagccgagccattgcaggaatgccagaatcttcaagcccagtaaccgcacttgaagttcaaccgcgtgaatggacgccagttattaacaca

SEQ ID NO: 22 - DNA, 20 bp, ARTIFICIAL
  Primer
tgttggcttaactggtggca

SEQ ID NO: 23 - DNA, 20 bp, ARTIFICIAL
  Primer
acgcggttgaacttcaagtg

SEQ ID NO: 24 - DNA, 20 bp, ARTIFICIAL
  Primer
gccaacaacgattctccgct

SEQ ID NO: 25 - DNA, 20 bp, ARTIFICIAL
  Primer
gttcaggccattcatcttcc

SEQ ID NO: 26 - DNA, 2449 bp, ARTIFICIAL
  Sequence of the ribB coding sequence and flanking regions.
aagaaagtgcggtcaggatcgactaacgaaacttctaaacctaagtatttctcgtaaggcgctttatcttgaggttcgctactaaatacgattgaaggctcaaaatgtttttcatgaaatagggttttaactgcttcactccaagattgccagccgtttggataactcggaataccgtcttcaaccaaatgatgaataaaaatctgatttttttgatatttgaaaatttgctgcatccaacgcaaacgatcttgcacggttggcatgcgtttcattttactatcgtaaaataatttcaaatcgcgcacagtgtcactacacacgataacgtgtagttcatcgactttactgaacgcttcataaatcatatttatatgacctgtgtgtacaggataaaatttcccgaaaatgacaccgacttttttctcttttgtttttgacataatctgctcttgatagcgtaagaattgagtgtgtttattgtaggctaaatgaaaatatttttcacgttctgatttagtgcctaggtattttgcgttatacttagctcgcattctcagggcagggtgaaattccctaccggtggtaaagcccacgagcgtttaaaagtgcggtcaatttttggcaaatttttcctgcgaaattgtcctgattttcacttttaaagtcagcagatttggtgaaattccaaagccgacagtaaagtctggatgaaagagaataaaacgagttgggttcccaaatcgtttattttatttgcatttctcagccctgattctggtatttaattgaaatctcaaattaggaaattactatgaatcagtcaattttatctccattcggcaacaccgctgaagaacgcgtacttaatgcaattaatgcctttaaaaatggaactggcgtattagttttagatgatgaagatcgtgaaaatgaaggcgatttaattttcccagcagaaacaatcacgccagaacaaatggcaaaattaattcgttatggcagtggcattgtttgtttatgcattactgatgaacgttgccaacaactcgatttaccgccaatggtagaacacaataatagcgtaaacaaaacggcttttactgtaacgattgaagccgcaaaaggtgtttctacaggcgtatctgccgcagaccgagtaacaaccattcaaacggcgattgcggataatgctgttctgacagatttacatcgtcctggtcatgttttcccacttcgtgcagcaaatggtggcgtacttactcgccgcggacacactgaagcttccgttgatttagcacgtctggcaggatttaaagaagcaggcgttatttgtgaaattactaacgatgatggcacaatggctcgcgcccctgagattgtagaatttgcgaaaaaatttggttattccgtgctaaccattgaagatttagttgaatatcgtttagcacataatatttaaaatgcaaaagtgcggtgaaaatttctatgatttttttaccgcactttttatattatactgttccaactttttatttatttgggttacttattatgcataatgcagctcagcacaattatgttatcagtttaactactgaacaaaaacgccgaaaacatattaccgaagaattcggtaagcagaatattcctttcgaattttttgatgctattacgcccgacattattgaagaaaccgctaaaaaatttaatattacattagatcgctctcctaaagccaagttgtcggatggggaaattggttgtgcattaagccatattgttttatgggatttagcattagaaaataatttaaactatatcaatatctttgaagatgatattcatttgggggaaaatgccaaagaattattagaaattgattatatttctgatgatattcatgttttaaaattagaagcaaatggcaagatgttctttaaacaaccaaaatctgtaaaatgcgatagaaatgtttatcccatgacggtaaagcaatcaggatgtgcaggatatactgttacagcaaaaggggctaaatatttgcttgaattagtaaaaaataaaccacttgacgtggcggttgattcacttgtttttgaggattttttacattttaaagattataaaatagtacaactttctcctggtatttgcgttcaagattttgtgttacatccagataatccttttgaaagcagtttacaagaaggacgagatagagtacacggaaatcaacgcaagtcctctattttagaaaaaataaaaaatgaatttggacgagtaaaaataaaaatgtttggaaaacaagttccatttaaataataaaagtgcggttaaaaatcttattaaattttaaccgcacttttttgtttattttacttctggtaaatttaccgcacctttatagcctaattgtcgccacgcttcataaaccgttactgcaaca

SEQ ID NO: 27 - DNA, 20 bp, ARTIFICIAL
  Primer
cttcactccaagattgccag

SEQ ID NO: 28 - DNA, 19 bp, ARTIFICIAL
  Primer
tgaagctggcgacaattag

SEQ ID NO: 29 - DNA, 19 bp, ARTIFICIAL
  Primer
atctccattcggcaacacc

SEQ ID NO: 30 - DNA, 21 bp, ARTIFICIAL
  Primer
gagccattgtgccatcatcgt

SEQ ID NO: 31 - DNA, 3060 bp, ARTIFICIAL
  Sequence of the ribF coding sequence and flanking regions.
gcaccacaaatggataacccagatcttgcgctcgctatcggaatttttcttggcggcttattacagttcttattccaaattccatttatgaaacaagcaggtttgctggtgaaaccaaaatgggcgtggagggatgaaggcgtaaccaaaattcgtaaattaatgatccctgcgttatttggtgtatcggtaagtcaaattaatcttttgctggatacagtgattgcgagcttcttaatgacgggctctattagctggttgtattattccgaccgcttactggaatttcctcttggtttatttggcattgcgatttctaccgtaattttaccaacgcttgctcgccaccacgttaatcgtgaaggcgattcagctaaaagtgcggttgattttcgtaatacaatggattggggcgtgcgaatgattttcttacttggcgttcctgcagccattggtattgctgtattggctcaaccgatgttacttacgctctttatgcgtggaaattttatgctaaatgatgtttatgccgcctcttattctttacgggcgtttaatgcgggtttgcttagctttatgttgattaaaatcctcgccaatggctattacgctcgccaagataccaaaacgccagtaaaaattggcattattgccatggtgagtaatatgggctttaatctattggcgattcctttcagctatgtaggattagctattgcttcagcgatgtccgcaacccttaatgcttatttactctatcgcggcttagccaaagcggatgtgtaccatttttcacgtaaaagtgcggtcttttttgtcaaagttttattggcggcaatcgcaatgggtgcggcagtttggtattacgtgcctgaaatcaaccaatgggcgaaaatggatttctttatgcgtgtttattggcttgtttggttgattgtattagccgcaatagtttatggtgcaacgttgattttattaggcgttcgcaagcaccatttgctgacaaaaaactaacttctcgctataatgccgaaattctcttattttcatggataaggacatgcaattaattcgcgggcttcacaatgcaaatcgtgttttacaaggttgtgcgctaacgatcggcaactttgatggcgtgcatttagggcatcaaaccgtccttcgccatttgcgtcaaaaagctgacgaattaaatttacccatggcggtattgttatttgaatcacagcctcgtgaatattttatggggaaaaatgcaccagcccgtttaatgcgtttgcgtgacaaaatttattatctcgaaaaggctaaggtcgatgtcgtaattgtggcgaaatttgaccgcacttttgccgagcaactagccgatgtttttattgaacaaacgcttgttaatcatctacatgtgaaatttttaagcattggcgatgatttcaaattcggctcaaaacgccaaggtaattttgccatgttgcaagcagctagtaagcgttttggttttattgttgaagataaccgtagtttttgtctagatgcacagcgaattagtagcacggcaattcgcgaagcgttagcgaatgatgacttacaacttgcagaaaatttactcggtaaaccttatcgtattttcgggcgtgtgattcatgggaataaattaggcagaacaataggatttccaacggcaaatattcgtttgcatagacaagtaaatccaatcaaaggcgtttatgccgtaaaagtgcggttaaaatcgggggagatttttaacggcgtggcaaacatgggaaaacgcccaactataaatggattaatgcaattattagaagtccatttatttgatttttctcagaatatttatggccaaatggtggaagtggaattctgccacaagattagaaacgagattaaattcccctcttttgatgatttgaaagtgcaaattgagaaagatgtagaaactgcgaaagcgttttttaacagttaattttaaaatgtaaaaattggaaaataaaatgacagtcgattacaaaaacactcttaacctaccggaaaccagctttccaatgcgcggtgatttagctaagcgcgaacctgataagtagaaaaattggtacgagaaaaatctttaccaaaaaattcgtaaagcgagtaagggcaaaaaatcttttattctgcacgatggccctccgtatgcgaatggtaacattcatattggtcacgctgtaaacaagattctgaaagatattattattaaatccaaaacggcgttaggttttgattcgccttatatcccaggttgggactgccacggcttgccaattgaattaaaagtagaaggtttagtgggtaaaccaaacgagaaaatttctgcggcagaatttcgtcaaaaatgtcgtgaatacgcggcggaacaggtcgagggtcaaaagaaagactttatccgtttaggtgtgttgggcgattgggataatccatatctcacgatgaatttcgataccgaagcgaatattatccgcactttaggtaaagtgattgaaaatggtcatttgtataaaggctcaaaaccagttcactggtgtttggattgcggttcttctttagcagaagcagaagtggaatatgaagacaaagtttctccgtcaatttacgttcgtttccctgcggaaagtgcggatgaaattgaagctaaattttctgcacaaggtagaggacaaggtaaattatcagccatcatttggactaccacaccttggacgatgccatctaaccgtgcgattgcggtgaatgcagacttagaatacaacttagtccaacttggcgatgagcgtgtaattttagctgctgaattagttgagtcagtggcaaaagcggtgggtattgagcacattgaaattctgggttctgtaaaaggtgatgatcttgaattaagccgtttccatcatccgttctatgattttactgtgccagtgattttaggcgatcacgtaaccactgatggcggtacaggtttagtacataccgcacctgatcacggtttagacgactttatcgtgggta

SEQ ID NO: 32 - DNA, 20 bp, ARTIFICIAL
  Primer
agatcttgcgctcgctatcg

SEQ ID NO: 33 - DNA, 20 bp, ARTIFICIAL
  Primer
cgtgatcaggtgcggtatgt

SEQ ID NO: 34 - DNA, 20 bp, ARTIFICIAL
  Primer
cagcgaattagtagcacggc

SEQ ID NO: 35 - DNA, 20 bp, ARTIFICIAL
  Primer
gccgtgctactaattcgctg

SEQ ID NO: 36 - DNA, 2762 bp, ARTIFICIAL
  Sequence of the yihZ coding sequence and flanking regions.
ggggcttcatcaatttcgccctctcctataacgatttcagcgtccatatgaattaaattcagcatataacgcatcgcttttaccgctgcatcgtctgccgcatttttatctcctcgaccaagccacgtgtaagctgctagagcggcggcttctgttactcgtgaaaattcaatggctaatgctcgattcattattattctccttctgcttatttttcaagattatggtaaaaatagcatcattctatcactgagtaatcgtttgcataataaatttttattcaatgctttaaaaaggtaaatttactgggtaaaatacccctaaacttacccatatttaaaaggaaatcattatgtctttagaaattttagaccagcttgaagaaaaaattaaacaagcggtagaaactatccaattacttcaattagaagttgaagaattaaaagagaaaaacgcagaatctcaaagaaatatcgaaaacttacaaactgaaaatgaacagctgaaaaacgaacatcgtaattggcaagagcatattcgttcattacttggtaagtttgataacgtttaatcgtagtaaaaggcttagattttctaagcctttttattttaatcatttgaataattttcttttctctttgagaaaaaataaatataggataataaaatgcacatttgcattctttcaggcagcactttaggtggtgcggaatatgttgccgagcatttaaacgatgttttagaaactcaaggtttctccaccgcactttttcacggaccaaatttatctgacattgaaaacgagaaaatttggcttgttgtgacttcaacgcatggtgcaggcgaattgccagacaatttaaaacctctatttgatgaattagcgaatagccaaaaggatttttcagatgttcgctttgcggtcgttggattaggtagttctgattatgatactttttgctatgcagcggacaaagtggagcaaacacttcaagcaaaaagtgcggtaaaaatttgtgagactttaaaaattgacgtgttaaacgtggatgatcaagaaagttatgctgaagaatggttgccgagttttattgagggattgaaatgatcgccctaattcagcgtgtgtctcaagcaaaagtggatgtaaagggcgaaacaatagggaaaattggcaaaggtttgttagttttgcttggtgtagaaaaagaagataaccgagaaaaagcggataaactcgctgaaaaagtgcttaattatcgaattttcagtgatgaaaatgacaagatgaatttaaatgttcaacaagcacagggggaattacttatcgtttcgcaatttacattagcagcggatacgcaaaaaggtttacgcccgagtttttcaaaaggtgcgtccccagcattggctaatgaattatatgaatactttatccaaaagtgcgcagagaaattacctgtttcaacagggcaatttgcagcggatatgcaagtgagcttaacaaatgatgggcctgtgacgttttggttaaatgtataataagaaaatctaagttggcaataagctcactgttttacatttgttttattaaatggtttagttaatggaatattctcgttaaagcgtataaattccatcaattaataatgaaccatatattcggttggtaagcaaaaaggcggactgaagccctccattgctccctcacccataaatgggcgtttcctttcaccaatggtcacttaataataacgagcaatcgcttattattttactaataaaaatgcgatgaaattcttttcaaattgcaccgcacttttaagaatataagaatagtaaattattgtcggattaaaagagcaacggcttcacaagcaatcccctcttgtcttcctgtaaagcctaatttttcggtagtcgttgcttttacattaacttgctcaatatcgcattggagatcttcagctattttggcacgcattgcatcaatatgtgggcgcattttaggtgcttgagcgatgatggtaatatcaacattacctattttatatcccttttcttgtacttgacgaaacgcttcacgcagtaagcctcgactatccgcatttttatattgcatatcagtatcggggaaaagttttccaatatcgcctaaagccgcagcccctaagattgcatcagttaatgcgtgtaatgccacatcgccatctgagtgcgcaataaagcccgtatgataaggcacttctacaccaccaataattaatggacgatcttcgccaaaagcgtgaacatcaaagccgtgtccaattctgatcataatttattccttgttaaataaaattctgctaatgctaaatcttcaggacgagtgacttttaaattatcgctacgtccagccactaagtgcggtcgaaatccagcaagttctattgctgatgcttcatctgttatattcgcaccttgttgaattcctgtggaaagcgcatctcttaatatatctactgggaaaaactgcggtgtcattgcttgccaaagctggctacgatcttctgtttttacaatacattgctgattgtccgctcgtttaatcgtatctgttactgggattgccaaaatcgcaccttgtttatcttcaatagctaacaatttatcaatatcagcatgttgtaaacaagggcgagcagcatcatgaacaagcacccaggcatttttttccgcaattgcatttaaaccatttaagaccgattcagctcgcgttgtgc

SEQ ID NO: 37 - DNA, 20 bp, ARTIFICIAL
  Primer
atctcctcgaccaagccacg

SEQ ID NO: 38 - DNA, 20 bp, ARTIFICIAL
  Primer
aacgcgagctgaatcggtct

SEQ ID NO: 39 - DNA, 20 bp, ARTIFICIAL
  Primer
gctgaagaatggttgccgag

SEQ ID NO: 40 - DNA, 20 bp, ARTIFICIAL
  Primer
agctcacttgcatatccgct

SEQ ID NO: 41 - DNA, 3150 bp, ARTIFICIAL
  Sequence of the yfgB coding sequence and flanking regions.
catcttcatattgggcttctcctgctacatcacgaattgttcttccatttaatgccgtgcagccgaatttttctaatttgcttttagtaaaactagaacgatacgctgaggaagtgttatttaaactaattacgccaatagttgcatttttgcatcggtgtttattaatgaaaacgagattataaccagattcttgaatgtagcctgttttattcactgccgcatcaaaaatttcatcacgcactaacttattggtatttttaatataaagtttttgtttccctgcttggatataagttgcactaagattagataaacgtttaatgtccgatttatttaatgaatatttggcgagcttaactaaatccattgggctggaaatattatagctagataatcctgaactatcgtgaaaacgagtagaatacataccaagttgatgggctttttcgttcattttcttaataaattggcgacgacttattcccgctgcacgagaaagcgcgtgggcggcatagttatcagaatggacaagcattgctttcaataattcgttacaagaaataggaatatttttaggtaattttgttccagtgcctttaattcgatccgtatcctcttttgtgattgcgattcgacaattaggatttttattattctctaaaaatacattagccgtcattaattttgttacagaggcaataggctgaatactatcagacgcgtggctttccaacactcgattatgggtaaaatcatacacaacataagactgtgccaacgcaaaagaaggacacaaagataaaataaataaagcttttttaaacattattggtcaccttaaaaaataggctgatattttaccgcactttttccgctgtaattgaaaatatttgcgatctagatcgcaaaaaagtgcggtaagattttctatcgtttttcaattccgctagattatgcggtgacaaatctgtacaatcgccgttcattttttaattgcgaatttttcgttgtgagtttttgataaaaacacctgcacaatgctatcgccacaatgtgtaataacgaggctaaaatgtcagaattattgtctgtgcaatcagatgcacccgctaaaaaaattaatctaatggatttaacgcgccaacaaatgcgcgaattttttaaagaactcggcgaaaaaccatttcgagcagatcagttagttaaatggatttatcattttggcgaagataatttcgacaatatgacaaacattaataaaaaattacgtgaaaaacttaaggcggttgcagaaattaaagccccagaagttgccgttgagcagcgttcagccgatggcacgataaaatgggcaatgcaagtgggcgagcagcaagttgaaactgtgtatattcccgaagcagatcgcgcgacgctttgtgtatcttcccaagttggctgtgccttagcttgtaccttctgttcaaccgcacaacaaggctttaaccgcaatttaacggtttcagaaattatcggtcaagtatggcgagcctctaaaattattggcaactttggcgtaactggcgttagacccattacaaatgtggtaatgatgggaatgggcgaacccttattgaatgttgctaatgttgttcctgcaatggaaattatgttagatgattttgcctacggtttatcaaaacgtcgtgtaaccttatcgacttctggtgttgtgccagcattagataatttgagcaaaatgatcgatgtggctttggctatttcattacatgccccaaacgatgaattacgtgatgaaattgtgccaatcaacaaaaaatacaatatcaaaacattgattgactcggtaaatcgttatttaaatgtatcaaatgcaaatcatggcaaagtgacgattgaatatgtgatgctcgatcatgtaaatgatggcgtagaacacgctcatcaacttgcagaagtattaaaaaatacgccttgtaaaattaatttaattccgtggaatccgttcccagaagcaccttatgcaaaaagctcgaatacgcgtatcgatcgcttccaaaaaaccttaatggaatatgattttaccgtgattatccgtaaaacccgtggagatgatattgacgcagcctgtgggcaattagcgggagatgttatcgatcgtactaaacgtacggcaatgaaacgccaatttggacaaaatattggggtgacagaagttaattaatattctaggtatgtgaattaatcaagttcacatacccctatgttttcatacaaattaaagcatattaagtatttcttcctgcccaattaaaaggaggaaaaatgaaaacaataagtaaacaactaagtgcggttattttccctttcattttttctgcctgcgtttcacaatctgcatctagcttaaatcatcaaactgccgctaaagcgcgtgtggaactcgctttgagctatcttcagcaaaataatcctcaactggctaaaatcaatttagacaaagcacttcaacacgataaaaattactatctcgtgcattcagcacttgcacattattatcaacaacaagggcaaatagaaaatgcctttcgtgaatatgaaatagccgtaaaccttaatcataaacaaggcgatgtgcataataattttggtacgtttctatgtagtcaaaagaaatttgaacaagctcagcaacaatttgaattagcacttaattcgccgaattattatcatcaagcagatacatttgaaaatatcgtgctttgtgcttattccgcgcaaaaaatggatatttatcagcaaacattagaaaaattacgtcaaatcgatggaaaacgtgcggaaaaattcaatagcctaaaataaagcattgccaaatcaagtattggactttaaaatttagcctccatttaccgcctaattatttgattaaatttatgaatccaactactgagcaagtgctttcccctggtgagatttttcgtcaaacacgcgaagccttaaatctttctcttgaagatgtcgctaaagaaatcacgctacgcccttctatattagagcaacttgaaaataatgaatttattcaaaaatctacccctgcaatctttgtaaaaggttatgtgcgtagctatgcaaagttcttacgtt

SEQ ID NO: 42 - DNA, 20 bp, ARTIFICIAL
  Primer
ttaatgccgtgcagccgaat

SEQ ID NO: 43 - DNA, 20 bp, ARTIFICIAL
  Primer
gcatagctacgcacataacc

SEQ ID NO: 44 - DNA, 20 bp, ARTIFICIAL
  Primer
gcacaatgctatcgccacaa

SEQ ID NO: 45 - DNA, 20 bp, ARTIFICIAL
  Primer
tctaacgccagttacgccaa

SEQ ID NO: 46 - DNA, 3120 bp, ARTIFICIAL
  Sequence of the yrdC coding sequence and flanking regions.
accgcactttcaggcacggtacaattagctaaaggtgttcaacttggttattttgctcagcatcaattagatactttacgcgcagacgaatctgctctgtggcatatgcaaaaactcgcgcctgagcaaacggagcaacaagttcgggattatttaggcagttttgcgtttcacggcgataaagtaaatcaagcagtgaaatctttttctggaggagaaaaagctcgtttggtgttggctttgattgtttggcaacgcccgaatttgttactacttgatgaaccgactaaccatttggatttggatatgcgtcaagcattaacggaagcattggtggattacgaaggttctttggtggtggtgtcgcacgatcgtcatttattacgcaataccgtggaagaattttatttagttcacgataaaaaagtggaagaatttaaaggcgatttagaagactatcaaaaatggctgagtgaacaaaacagtacgtctgaaaataaagtttcggaaaaagtgggcgataatgaaaattcggttcaaaatcgcaaggaacaaaaacgccgtgaagcagagttacgccaacaaactgcaccattacgtaaaaaaatcacgcaattagaagaaaaaatgaataaattttcttctgagcttgcgaacatagaaaatcaactggcagataccgaattatataatgccgaaaataaagaaaaattgaccgcacttttggctcaacaagtggatgtgaagaaagcattagatgatgtagaaacggaatggatgactgcacaggaagaattggaagaaatgcttcaagcataaggatagattatgaatcaaagcctttttcatcatagcaaacaacaggaatattgccctcaatgtggtgcgccgttgcaaattaaacaaggcaaaaaagggctgtttctaggttgctctgcttatcctgaatgtgattatttgcgtcctttgcaacgatcggagcataaagtattaaaaacacttgatgaaatttgcccgaagtgcggtaatttattgcagttgaaacaaggcagttttgggatgtttattggttgtagtcattatcctgaatgcgattttgtggtgcgggaagaatctgaatctgaggaaaaaattacttgtcctgaatgtaaaacgggacatttgatttctcgtcgaggtcgccaaggaaagattttttacggctgtgataatttccctaaatgtaaattttctttgcctgccaagccttattccgtgccttgcccaacgtgccattttcctctttctttgttaaaaagcgaagatggggaaaaacaaattttccagtgtgcaaataaaacttgccgtcatatttttgagcaataaaagtaaaagaatgaaatgaatagagaacaaatcgccgatgcccttcgacaaaatcaagtggttgcttatcccactgaagctgtatttggtttaggctgtaatccgcaaagtgaaagtgcggtaaaaaaattactcgatttaaagcaacgtccagtggaaaaagggctgattttagtcgctcctagcttagattttttccgtccttttgtcgattttgagcagattaacgatgaacagctttctcgcctgcaaggtaaatatgaacgtccaacgacttggattgtgccagctaaatccaccaccccgcattttctcacaggaaaatttgatagcattgcaatacgtttgtgcgatcacccatctgtgaaagccttatgtgaactcacgggttttgcattaacttcaacgagtgcaaacctaacaggagagccaccttgccgtaccgccgatgaagtgcggttacaattcggttcagattttccagtattgaatgaaatggtaggcagggcgcataatccatcggaaattcgagacttgcgcaccaatcaactttttagacagggataatttatggatctttatgctgtgtggggcaatccgattgcgcaaagtaaatcgccgttaattcaaaataagttagccgcacaaacccatcaaactatggaatacattgcaaaattaggcgatcttgatgcttttgaacaacagcttttggcattttttgaggagggtgcgaaaggttgcaatattacttcgccttttaaagaacgcgcttatcagctggcagacgaatatagccaacgagcaaaactggcggaagcctgtaatacgctaaaaaaactcgatgatggaaaactttatgcggataacactgatgggattggcttagtgacggatttacaacgtttaaattggcttcgtccaaatcagcacgtattaatcttgggggcgggcggagcaacaaaaggcgtattattgccacttttacaagctcaacaaaacattgtgcttgctaaccgcactttttcgaaaaccaaagaattagctgaaagatttcagccttacggcaatattcaagctgtctctatggattcgattccgctacaaacttatgatttggtgattaatgcaacttccgctggattaagtggtggaacggcttcagttgatgctgaaattttaaaattgggctcggctttttatgatatgcaatatgcgaaaggcacagacacgccatttattgcattatgcaaaagtttaggtttaaccaatgttagcgatggctttggaatgttagtcgcacaagcagcacattctttccatttatggcgaggcgtaatgccagattttgtctcggtttatgaacagcttaaaaaggcgatgttatgactactcgatgcccttgggttggcgaacaatctatttatattgattatcatgacaaggaatggggaaagcctgaattcgacagccaaaagctatttgaaaaaatttgtttggaagggcagcaagcggggctttcgtggattacggttttgaaaaaacgtgaatcttaccgtgaggcttttcatcaatttgatccgaaaaaaattgcaaaaatgaccgcacttgatattgatgcttgcatgcaaaattcaggattaattcgccatcgagccaagttagaagccattgttaaaaatgcgaaagcttatttggcgatggaaaagtgcggtgaaaatttcagtgattttatttggtcatttgtaaatcata

SEQ ID NO: 47 - DNA, 20 bp, ARTIFICIAL
  Primer
tcaggcacggtacaattagc

SEQ ID NO: 48 - DNA, 20 bp, ARTIFICIAL
  Primer
gctcgatggcgaattaatcc

SEQ ID NO: 49 - DNA, 20 bp, ARTIFICIAL
  Primer
aagccttattccgtgccttg

SEQ ID NO: 50 - DNA, 20 bp, ARTIFICIAL
  Primer
attggtgcgcaagtctcgaa

SEQ ID NO: 51 - DNA, 2911 bp, ARTIFICIAL
  Sequence of the suhB coding sequence and flanking regions.
cgaacctttgccaatacacccatttttatttaaatcataaaagaacaacacgcagctattaggtggcgcattatcttcttggctaataaaaatagctgtgccttgttcatctaattcaaataaagataaattgctttccgtcagttttgcatttaatgctcgaaatcctaatcggcgaagatctttacctattaactgtaatgttcgttgtaattcagcttgtaattttaaatgtaataacatgtgttgattttgcgtttgtatttgcacataaaaatgcgaaatgcttagcaataataaagacgacaaagacagtgaaatcatcagtgctaatagggtttgcccttttaataatactttcatcattaattacaagcactatcaaattgattagttttcacacgaatactgccaacattgaaaaataaaaataacgtacgttcattttcagcttgcaaaataaagcaacgagtaacaatagtattacgaatgccatcaaatctcgtgatttcttttggataaatatgatgactttgaatcatcgttttgttaggaaaataagggtagtaaaaatgagcataaacctctttcgggcaatttatcggatttaaacaatcacaagtttggttattttttacttgtgccgttaagcaccattgctgtgtcgcaagattacgattgataagtaaaaaccacacttccgatgaattttctgcccgagcctgaatttggcgtagaaataaatacaggcgatgttgctctttggctaaaatcgttttaggtgaatcggttttccataatggtactgcaaaattcagcgcaatactgataatggctaacccaatcaataattccactaatgtcatacctttctgcataaaacgctccaattttccaccgcactttaaccataaatgaatgggtagaaaaatcacttgatctgattttmgcgatctgtatcgcaaagtttttctgaaaacctataaaaaccactgttttatgattttcaactagttattttggcaaatctcgctataatggcacggaatttttctgttctttaaaagctggtggaaatatgaatccaatgttaaatatcgcaattcgtgcggcacgaaaagcgggcaatgtgattgctaaaaattatgaacgccgtgatgctatcgaaagcacacaaaaaggtattaatgattatgtaacaaacgttgataaagcgtctgaagcagaaatcattgaagttattcgtaaatcttatcctgatcacacaattattacggaagaaacaggcgcaattgaaggcaaagatagcgatgtacaatggattattgatccgctagatggtactcgtaattttatgacagggcttccccacttttctgtgtctatcgcagttcgtgtaaaaaatcgcactgaagtcggggttgtttacgatccaatccgtaatgaattatttaccgctgtgcgtggcgaaggtgcaaaattaaatgaagtacgtttacgtgtagatagtaaacgtgaaattcaaggttcaattttagccactggtttcccattcaaacaaccaaaattaatgccagctcaatttgcaatgatgaatgccttaattgaagatgctgcggatttccgtcgtactggttctgccgcattggatttatgctatgtggcgtcaaaccgtattgatggttattttgaaatgggcttaaaagcatgggattgtgctgctggcgatttaatcgtgcgtgaagcgggtggtttagtttgcgattttgatgctggtaacagctacttacgcagtggcaatatcattgctgcaccatcacgcgtaattaaagaaatgttaaataaaattcgcccttgtttaggtgctgaatttaatcattaatttttataagcacaatagcacctatcaaggtgctatttttaattttattaatgaaacatacttgattagcgactttatctgcgcatcaacgaaaaaaacgacgacattatgcttccagaacttggctttttccttcttttactcgcaacagctagcgcgtttttccttgcgttagtgcctcaatttgggttattcaaaaaaaatccgactttaattaatgctgcttggccgcttagttatatttttacccttgcgacgacgttatcaattggtttgcttgcttattcttttgcggtggatgatttcacccttgaatatgtagcggcacattctaattcccaattacctacattttttaaagtggctgccacttggggaggacatgaaggttcaatgttgttttggttattttcattgagtttatggcttgctgcttttgctttttttaatcgaaaaaatgaccgcactttttctgctcaatctttatctttattgggattgatttgctttggttttgcggtgtttattttattttattccaatccatttggacgcattttcccagcacccgcagaagggcgcgatctcaatccaatgttgcaagatgtgggattaattttccatccacctttactatatgttggctatgtgggctttgcggtaaattttgcaatgagtttgagtgcgttgatttataaccaatctgcacgacaaattgcccgctcaatgcgtggatgggtgttggtttcttggttatttttaaccattggcattgtgcttggtgcttggtgggcttattacgaacttggctggggcggttggtggttctgggatcccgtagaaaatgcgtctttaatgccttggttgcttggtttggcattattacacagtttaatggcgacggaaaaacaaggcgtatttagttattggacaacgcttttttctctgcttgcttttgcctttagcgtattaggcacgtttattgttcgttctggcgcactcacttctgtgcatgcttttgcattggat

SEQ ID NO: 52 - DNA, 20 bp, ARTIFICIAL
  Primer
aacacgcagctattaggtgg

SEQ ID NO: 53 - DNA, 20 bp, ARTIFICIAL
  Primer
agaagtgagtgcgccagaac

SEQ ID NO: 54 - DNA, 20 bp, ARTIFICIAL
  Primer
aacgccgtgatgctatcgaa

SEQ ID NO: 55 - DNA, 20 bp, ARTIFICIAL
  Primer
ctgcgtaagtagctgttacc

SEQ ID NO: 56 - DNA, 2990 bp, ARTIFICIAL
  Sequence of the yhbJ coding sequence and flanking regions.
tttactcgggccaaacggtgcaggtaaaacaacaactttctatatggtcgttgggcttgttcgccaagatcaaggtaaaattgttattgatggcgaagatattagtttgctcccaatgcataatcgtgcgcaacgtggcattggttatttaccgcaagaagcctcgatttttcgccgtttgactgtctatgaaaatttgatggcggtattggaaattcgtaaagatttaaccccacaacaacgtcgcgaaaaagcagatgaattaattgaagaatttaacattagtcatattcgagataatttagggcaagccttatcaggcggagaacgtcgccgtgtagaaatcgcacgtgccttagcagcaaatccaaaatttattctattagacgaaccttttgctggtgtagatcctatttctgtgagcgatattaagaaaattattactgatttgcgcaatcgtggattaggtgtattaattactgaccataatgttcgtgaaacccttgatgtttgcgaacgcgcttatattgttggcgcaggtaaaattatcgcaacaggcacaccagaacaagtgatgaacgatgaacaggttaaacgcgtttatcttggcgaacaattcaaattataaaaatgaaaataactgaactattaagccctgaaaatattcgtcagggcgttagtttttctagcaaaaaacgattatttgagtctattgcgcattttgtagaagaacaaatccttgcagaaaaaggcgaacaagcctgttttgaatgcctttttgaacgtgaaaaactggggaattctggtttaggaaatgggattgcaatgccaaaagcgaaaatccccgtaacagtatcagataaagcaatcgcagtgtttatgcaactcgataatccgattgattacgatgcttttgatggtaaaccagtggatttaatctttgccttgctaattccagaaaatcaatgtgaaacctacattccagttttagcatcattaatagaaaaactgactgataaaaatgtgttgaaacaattacgatcagccaaaagtgcggatgaaatttggcaagtttttgaaattaccgatcaatcagaaacgacatttgaagaagtgaaagaataattacagtggggaaacttatggaaattatcattattagtggacgttctggcgcaggaaaatctgtagccttacgagcattagaagatgccggatattattgtgttgataatattcctctggatttacttcctcaattgactgatattctatctcaatcccaatcatctgtcgccatcagtcttgatattcgtaatattccaaactccgctcattctcttaagcaaaccctttcaacattacaaaagcatcatcagattaaaatcattttcttagaggctgatcgtgccaccctgattcgccgatatagcgattcacgccgtttgcacccgctttcattaaaagatttatctcttgaagccgcaattgatgaagaatatcgctatcttgaaccattgattcaacacgcaaatcttattcttgataccacccatctttctacgcatagtcttgcagagcgattacgcgaatttttacgcggtaatagtgaaaaagaattaaaaattattgttgaatcttttggttttaaatatgggattcctttagatgcggattatgttttcgatgtacgatttttacctaacccccattgggatccaacattacgcccaatgactggattagaagcccctgtcgcagaatttctaaatagtcatacagaagtcaatgaatttatttatctcactcgtcattacattgatacttggttgccgatgttagaaaaaaataaccgtagctatttgacgattgccatcggatgtactgggggaaaacatcgctccgtttatattgcccagcaattaggcgaatattttcaagccaaaggaaaaacggtgaaaattcaacataaatctttagaacggaacaaaaaaatataaaaagtgcggtcataaaaacattatttttattgaccgcactttttttacacgctcacaggctttacaatttcactaggataacagcctaaaatctttaagtaattactataattttttagttcttccaaagcctgttttgtatctggatgatgaatatttgcttcaatttctagataaaacatttcttcccaaggcttaccataaatcggtctagattccagttttgtcatattgatttgatgctttttaaacaccaataaagcatccactaacgcaccagcttgctgtgaagttgtcattaataataaggtctttgtgggaatctgtgatgaaacttcgcgaggctctttagccaccacaataaaacgcgtaatattgttctcttgattagcaatattagtttttaatacactaagtccatacaattttccaccgtcttcattgcccaatgctgcaatattaggtttattcaaacttgcgactaattgcattgcgtgtgaactactttcgcaatattcaatatgcacgcgatcaaggctatgaataaattgactacattgttgaatcacttgaggatgactatacaacgtatcaatttggttcaaatctgtcttatcattgacaagtacgcaatgtttgattggatatgccaactctcccactaatgataaatcagtatgctgaagtaaatcataaacttcattaattgcacccgatgttgtattttctaaaggtaacacaccaaagtcagcttctccagtctgaactttttcaaatacttgctcaaaagactgacatcctagttctacaaattgtttttgataacgagcagcataattacgtgcagctaaattagaataagaaccacgtttacctaaaaaagcgatatgtaaattttgattacgttgttcattaagtttattttgcaaatagacttgctgggtcaataccgagtcttcaatgattttttggaaaattgaagtgatatat

SEQ ID NO: 57 - DNA, 20 bp, ARTIFICIAL
  Primer
cataatcgtgcgcaacgtgg

SEQ ID NO: 58 - DNA, 21 bp, ARTIFICIAL
  Primer
tgtagaactaggatgtcagtc

SEQ ID NO: 59 - DNA, 20 bp, ARTIFICIAL
  Primer
tacagtggggaaacttatgg

SEQ ID NO: 60 - DNA, 20 bp, ARTIFICIAL
  Primer
gcgtgttgaatcaatggttc

SEQ ID NO: 61 - DNA, 435 bp, ARTIFICIAL
  yihZ gene sequence
atgatcgccctaattcagcgtgtgtctcaagcaaaagtggatgtaaagggcgaaacaatagggaaaattggcaaaggtttgttagttttgcttggtgtagaaaaagaagataaccgagaaaaagcggataaactcgctgaaaaagtgcttaattatcgaattttcagtgatgaaaatgacaagatgaatttaaatgttcaacaagcacagggggaattacttatcgtttcgcaatttacattagcagcggatacgcaaaaaggtttacgcccgagtttttcaaaaggtgcgtccccagcattggctaatgaattatatgaatactttatccaaaagtgcgcagagaaattacctgtttcaacagggcaatttgcagcggatatgcaagtgagcttaacaaatgatgggcctgtgacgttttggttaaatgtataa

SEQ ID NO: 62 - DNA, 1173 bp, ARTIFICIAL
  yfgB gene sequence
atgtgtaataacgaggctaaaatgtcagaattattgtctgtgcaatcagatgcacccgctaaaaaaattaatctaatggatttaacgcgccaacaaatgcgcgaattttttaaagaactcggcgaaaaaccatttcgagcagatcagttagttaaatggatttatcattttggcgaagataatttcgacaatatgacaaacattaataaaaaattacgtgaaaaacttaaggcggttgcagaaattaaagccccagaagttgccgttgagcagcgttcagccgatggcacgataaaatgggcaatgcaagtgggcgagcagcaagttgaaactgtgtatattcccgaagcagatcgcgcgacgctttgtgtatcttcccaagttggctgtgccttagcttgtaccttctgttcaaccgcacaacaaggctttaaccgcaatttaacggtttcagaaattatcggtcaagtatggcgagcctctaaaattattggcaactttggcgtaactggcgttagacccattacaaatgtggtaatgatgggaatgggcgaacccttattgaatgttgctaatgttgttcctgcaatggaaattatgttagatgattttgcctacggtttatcaaaacgtcgtgtaaccttatcgacttctggtgttgtgccagcattagataatttgagcaaaatgatcgatgtggctttggctatttcattacatgccccaaacgatgaattacgtgatgaaattgtgccaatcaacaaaaaatacaatatcaaaacattgattgactcggtaaatcgttatttaaatgtatcaaatgcaaatcatggcaaagtgacgattgaatatgtgatgctcgatcatgtaaatgatggcgtagaacacgctcatcaacttgcagaagtattaaaaaatacgccttgtaaaattaatttaattccgtggaatccgttcccagaagcaccttatgcaaaaagctcgaatacgcgtatcgatcgcttccaaaaaaccttaatggaatatgattttaccgtgattatccgtaaaacccgtggagatgatattgacgcagcctgtgggcaattagcgggagatgttatcgatcgtactaaacgtacggcaatgaaacgccaatttggacaaaatattggggtgacagaagttaattaa

SEQ ID NO: 63 - DNA, 870 bp, ARTIFICIAL
  yhbJ gene sequence
gtggggaaacttatggaaattatcattattagtggacgttctggcgcaggaaaatctgtagccttacgagcattagaagatgccggatattattgtgttgataatattcctctggatttacttcctcaattgactgatattctatctcaatcccaatcatctgtcgccatcagtcttgatattcgtaatattccaaactccgctcattctcttaagcaaaccctttcaacattacaaaagcatcatcagattaaaatcattttcttagaggctgatcgtgccaccctgattcgccgatatagcgattcacgccgtttgcacccgctttcattaaaagatttatctcttgaagccgcaattgatgaagaatatcgctatcttgaaccattgattcaacacgcaaatcttattcttgataccacccatctttctacgcatagtcttgcagagcgattacgcgaatttttacgcggtaatagtgaaaaagaattaaaaattattgttgaatcttttggttttaaatatgggattcctttagatgcggattatgttttcgatgtacgatttttacctaacccccattgggatccaacattacgcccaatgactggattagaagcccctgtcgcagaatttctaaatagtcatacagaagtcaatgaatttatttatctcactcgtcattacattgatacttggttgccgatgttagaaaaaaataaccgtagctatttgacgattgccatcggatgtactgggggaaaacatcgctccgtttatattgcccagcaattaggcgaatattttcaagccaaaggaaaaacggtgaaaattcaacataaatctttagaacggaacaaaaaaatataa

SEQ ID NO: 64 - DNA, 2400 bp, ARTIFICIAL
  Sequence of the efp coding sequence and flanking regions.
aatttgcgcatcatcattcacgccttttagcaaaacagattgattcaaaagcgtgacattcacggcgtttaatttttgcatcgcatgagcaaaaatttgatcaatttcattcgggtgattaatgtgtgtcaccataactgtttgcaaacgagtttctgctaataaagtgcaaaattcatcagtaatccgttgcggaatcacaacaggcaaacgggtgtgaatacgcaaacgttgtaagtgcggtatattttccaaatgttttattaaccacgctaattcgtgatctttcgccattaaaggatcgccacctgaaaaaatcacttcttctatttcagaatgtgccgcaatgtaatctaacgccagttgccagctttttttatttcctgggttttcatcgtaaggaaaatgtcggcgaaagcaataacgacaattcaccgcacaaccgccttttgccataaagagcaagcgatttctatatttatgaagaatatttggcaccgcattggcatttttttcttctaagggatccgtactaaatccctccgcttgcacaaactctaaatcagaacacatcacttgcaagaaaaggggatcttgcggattacctttttctattttatcaatgaaaggttgtggcacgcggagcgaaaaaagtttccgcgcagcaatggattgctcaaaatcatcttctggtaaatttaaggcttttagtaataatttaggatctgaaatggcattttttagaattgtgagccaattttgttcttctctaatgacgggttcttggggtaaaatacgcacttttcaaaccatctctcatttttaggatatttcaaatatggctacatatactaccagtgatttcaaaccaggtctaaaatttatgcaagacggcgagccttgtgtcatcgttgaaaatgaatttgtaaaaccaggcaaaggtcaggcattcactcgtactcgtattcgtaaattaatttcaggcaaagtattagacgtaaactttaaatctggcacttcggttgaagcagctgatgttatggatcttaacttaacttattcatacaaagacgatgcattctggtactttatgcacccagaaacatttgaacagtactctgcagatgcaaaagccgtaggcgatgcagaaaaatggttattagaccaagcagattgtatcgtgactttatggaatggcgcaccaattactgttacgccaccaaactttgttgaattagaaatcgtcgatacagacccaggtcttaaaggcgataccgcaggcactggcggtaaacctgcaacattaagcacaggcgcagttgtaaaagtgccgcttttcgtccaaatcggcgaagttatcagagttgatacccgctctggcgaatacgtctctcgcgtaaaataattgtttagatgacaaaagtgcggttaatttctgcgatatattgtagtaataaaaagcactgaaattcattcaacaaaaatgcctttccgttcataaataggaaaggcattttttataagctgtggtaaaaataatcacttgataaaaatgagattatttctacttgacggtttttattagagaacgtattattcacgctcgttaaatcacggaggaatggtcgagtggttgaaggcaccggtcttgaaaaccggcgagggtttacgccctcctagggttcgaatccctattcctccgccatcaatttttacgagctaactaattcggaagaattagttttttatttctaatcatttgttttccgtattttcacggttttccacttcttctttaaacaccaaatattcttctaaaagatcgattgcatcttggcatttttgctggcgttttttataaacttctgcaagttgagcataacgtattttctcatcattatttttttcagcttgtgctaaatctttatgctgtcgataaagattattcaattgttctcgtgcttcgtaatatttttctaggcgttctcttggtggtaatttatgaatgctatgttgagatttttgaatggtttgtttcgttgttgtttgggattcagttagatgagtatttttgcgaactaaagcttccgaaagaacggaacattggcgagtaaacgctcagctagaaaattatagtgattagaatcgttagactctaatgtctttattctatctagcgtttgattgatttcttttagataaaaggaaacattttgtccattttcactgaacaaagtgcggtcaaatttggcgaagattttttcttctcgtttggataaatgagcttgataaagttgttgaactttttgatctaagcgttggataagttgttgaacagtcataaaaaaatcccccaagtgggggattataatcgttaaaggtacattgctgcaatccagc

SEQ ID NO: 65 - DNA, 21 bp, ARTIFICIAL
  Primer
cattcgggtgattaatgtgtg

SEQ ID NO: 66 - DNA, 20 bp, ARTIFICIAL
  Primer
ctggattgcagcaatgtacc

SEQ ID NO: 67 - DNA, 20 bp, ARTIFICIAL
  Primer
accagtgatttcaaaccagg

SEQ ID NO: 68 - DNA, 20 bp, ARTIFICIAL
  Primer
gagagacgtattcgccagag

SEQ ID NO: 69 - DNA, 2945 bp, ARTIFICIAL
  Sequence of the fba coding sequence and flanking regions.
aatggatgcctttggtacagcgcaccgcgcgcaagcatcaacttatggcgttgcagaatttgcgccgatcgcttgtgcaggcccattattagccgctgagttagatgcattaggtaaagcattaaaagaacctgctcgtccaatggtggctattgttggtggttctaaagtttccactaaattagaagtattaaattctctttcaaaaatcgctgaccaaattattgtgggcggtggcattgcgaatactttcatcgcggcagctggtcacaatgtaggtaaatctttatatgaagctgatttaattccagttgcgaaagaattagccgcaaatacagatattccagttccagttgatgtgcgtgtaggtttagagttctctgaaacggcagctgcaacagaaaaagtggtaaatgaagtgaaagatgatgaatctatttttgatattggcgataaatcagcagaacaattggctgaaattatcaaaaatgcaaaaaccgttttatggaatggcccagttggcgtgtttgagttccctcacttccgtaaagggactgaaatcatttctcacgccattgcaaacagcgatgcattctctatcgctggtggcggcgataccttagcggctatcgatttatttggtattgctgataagatttcttacatttcaacgggtggtggtgcattcttagagtttgtagaaggcaaagtattacctgcagtagaaattcttgaaaaacgtgcgaaaaactaaccgcacttttcctctataacatattgatggtggcatcaaaaatgccatcatcaatacaaattcttcaaattgtgggcttatcccgctaaacataaaaaggaaacacaagtatggctaaattattagatattgtgaaacccggtgttgtaacaggcgaagatgtgcaaaaagtttttgcttatgctaaagagcataactttgctattcctgccgtaaactgtgtgggttcagactccgttaatgccgtgttagaaactgctgcacgcgtaaaagcaccagtgattatccaattttcaaatggtggcgcagcgttctacgcaggtaaaggtatcaaaccaacgagtggtactcgtcctgatgtgcttggtgcgattgctggagcgaaacaggttcatactttagcgaaagaatacggtgtgcctgttattcttcatactgatcacgcagcgaaaaaattattaccttggatcgacggtttattagatgcaggcgaaaaacattttgccgaaacgggtcgtccacttttctcttcacatatgatcgatttatctgaagagtcaatggaagaaaatatggcaatctgtcgtgaatacctcgctcgtatggataaaatggggatgacccttgaaatcgaaattggcattactggtggcgaagaagacggcgttgataactctgatgttgatgaatcacgtttatatacacaaccttctgatgtgctttatgtttacgatcaattgcatccagtaagccctaactttaccgttgctgctgcattcggtaacgtacacggtgtttacaaaccaggtaatgtaaaattaaaaccatctattttaggtgaatcacaagagttcgtttctaaagaacgcaatcttcctgcaaaaccaattaatttcgtattccacggtggttcaggttctagccgcgaagaaatccgcgaagcaattggctacggtgcaatcaaaatgaacattgatactgatacgcaatgggcatcttggaatggtattttgaatttctataaagcaaatgaagcatatcttcaaggtcaattaggtaaccctgaaggcccagatgcaccaaacaaaaaatactacgacccacgtgtttggttacgtaaaatggaagaatctatgtctaaacgcttagagcaatctttcgaagacttaaattgtgttgatgttttataatccacaaaaataacataaaatacgaccgcactttcaagtgcggtttttttattttagcggagaaattatggaaaagattttagttattcgtaacgataaattaggcgattttatgcaagcatggcctgcttttgcaatgttgaaagcctcaaatccaaagctaaaattaaccgcacttgtgccgagttacactgcgtctttagcggaaatttgtccatttattgatcatgttattattgatagcaaaaaaaatgacaaaacggatttcaaacgtcttgtgcaggaaatcaaagcgcagcagtttgatggcatgattagtttcttttccaatacccataatggaaaactcgcttggaaaagtggaattaaatatcgccttgcgcctgcgactaaatgggttcaaattctctataatcaccgtctaacacaacgccgttctcgttctgaaaaatcagaagcggaatacaatcaagatttagtccgcacttttttgcaaaagcataatatgccagttgttgaacctaaaccgccttatttaatctttgagaaaagtgcggtggaaaatcagcgcgtttttttacaagagaatttagggctttccgcaaataaaaaatggatctttgtgcatagcggttctggtggttcagctacgaatctttctttagcgcaatatgcggatttaattaaaggcttattggctgagtttgattgcaatgttgtgctgactgcagggcctggcgaaagtgaaaaagcctatgaattagcaaatcttgtgaatgatttacgcgtagccatttacgataagaataaaggtttagtggattttgctcattctttggcttgtgcagatttatttattgcgggatctactgggccattgcatttgagcagtgcgtttaatattccgactatcgggttttatccaaatagtcgttcttctcagccgagacgttggaaacccattaatgatgtcgataaacatattgcattttgcccacccg

SEQ ID NO: 70 - DNA, 20 bp, ARTIFICIAL
  Primer
gcgcaagcatcaacttatgg

SEQ ID NO: 71 - DNA, 20 bp, ARTIFICIAL
  Primer
ggtgggcaaaatgcaatatg

SEQ ID NO: 72 - DNA, 20 bp, ARTIFICIAL
  Primer
cggtgttgtaacaggcgaag

SEQ ID NO: 73 - DNA, 20 bp, ARTIFICIAL
  Primer
gattgcaccgtagccaattg

SEQ ID NO: 74 - DNA, 2954 bp, ARTIFICIAL
  Sequence of the fmt coding sequence and flanking regions.
acgagagataaaagagacgagagataaaagagaaaagacgagttatcaaagaattatcctggcggcgatagtgcggtggacccacctgagaccataccgaactcagaagtgaaacgctgtaatgccgatggtagtgtggggtttccccatgtgagagtagggcaccgccaggttaccaaatacttatctaagttaaataaaaacagaaggaccccgtgtcgaaagatatggggttttagcttttgggaatttattcattatttaatcaaataagtgtctaattttaattttcaataagtaagtaatttttcaactcatatgaagtcacattcctataaatgttttattagctgtgctataatcccactaaaattctacccttaaaaacaagagaaattatgaccgcacttaatgtattaatttatcctgatgatcacttaaaggttgtctgtgagcctgttactaaagttaatgatgcaattcgtaaaattgttgatgatatgtttgatacgatgtatcaagagaaaggtattggtttagctgcacctcaggtggatattttgcaacgtattattactattgatgttgaaggcgataaacagaatcagtttgttttgattaaccctgaaattttggcttcagaaggcgaaacgggaattgaagaggggtgtttatccattccagggttccgtgcgttggttcctcgtaaagaaaaagtgacagtgagagcgttagatcgtgatggtaaagaatttactttagatgctgatggtttgcttgcgatctgtattcaacacgagatcgatcatcttaatggaattttatttgttgattacctttctccacttaaacgccagcgcattaaagaaaagttgattaaatacaagaagcagattgcgaaaagctaaaacgtagggtgggctttagccagcaatcatttcaaaaaacggtgggcttaagcccaccctacttcctatcaattaccataacgtagaacattatgaaatcacttaatattatttttgctggtacgccagattttgctgcacagcatttacaagccattctaaattctcaacataatgtgatcgctgtttatactcaacctgataaaccagctggtcgcggtaagaaattgcaagcaagtcctgtaaagcaacttgctgagcaaaataacattcccgtttatcaacctaaatccttacgtaaagaagaagcacagtctgaattaaaagcgttaaatgcagatgtaatggttgttgtggcttatggattaattttaccgaaagctgtattagatgccccccgtttgggttgtttgaatgtgcatggttctattcttccacgttggcgaggtgcagcaccaattcagcgttcaatttgggctggcgatgtacaaacgggtgtaaccattatgcaaatggatgaaggtttagatacaggcgatatgttacataaagtctattgtgatattttaccgactgaaacttcaacgagtctttataacaaactggcagagcttgctccatcagcattaatcgatgttttagataatcttgaaaacggtaaatttatagcggaaaaacaagatggcagccaaagtaattatgcagaaaaactttctaaagaagaggcgcaattaaattggtcactttctgcaatgcaacttgagcgtaatatccgcgcttttaatccttggccaattgcctatttttcaacagaagacaaggatggcaatgcacacactttaaaagtgtatcaagcgaaagtgttgcctcatcaagataaaccagcgggaactattttaagtgcggataaaaatggcattcaaattgcgactgtcgatggcgtcttaaacttattgcaattacaatctgcaggtaaaaagcctatgtctgcacaagatttattaaatggccgtgcagaatggtttactattggtaaggtgcttgcataatgaaaaaattctcttctaaaactatcaaagcaaaaaattcagtaaaaatgaccgcactttcgaccagggctattgctgcaaacttaattttgcaagtattggatgagggcaaatcattgtcagcgttaattccagaagtgcaactttctgtaaaagctcaagatttgcctttactacaagaaatttgttttggcgtgtgtcgagtattgcctcgcttagagcaaattatcaaacgtcttgtggataagccgcttaaaggtaaaactcgcattgttcattgcctgttacttgtagggttataccaattgctttatatgcgagtgcctgctcatgcggcagttgatgaggttgtgaacgcaacaaaatcattaaaatctgatagttttagaggattagtgaatgcggttttgcgtagatttttacgtgaacaagatgaaattttggcaattatcgataaaaattggcaaacgcttcaccctgaatggttcgtgaataaattaaaaaaagcctatccgaattggcgtgagatcattgaggcgaacaatcagaaaccaccaatgtggctacgtgtgaattcacaaaaaaacgccctcgaaacttaccgcactttacttgaagaacaaggtgtttcttcgaaaacaagccatcatcctaatgcgctatgtttagatataccgattgcggtgcaaaaattaccacactttgaagaaggggcggttacggtgcaagatttgagtgctcaatgggcggcaacgttgcttgagccaaaaaatgaggagtggatcctcgatgcttgcgcggcaccaggcggtaagacgacccatattttagaactggcacctcaagctaatgtgattgcattagatgtagaatctcatcgcttaaaacgagtagaagaaaatcttgaacgtttaaatcagcaagcgatagtggtgtgtggtgatgcgagtaaacctgacgaatggttagctgaaatcggtaaaagtgcggcgaaatt

SEQ ID NO: 75 - DNA, 20 bp, ARTIFICIAL
  Primer
cacctgagaccataccgaac

SEQ ID NO: 76 - DNA, 20 bp, ARTIFICIAL
  Primer
caagcatcgaggatccactc

SEQ ID NO: 77 - DNA, 20 bp, ARTIFICIAL
  Primer
tggtacgccagattttgctg

SEQ ID NO: 78 - DNA, 20 bp, ARTIFICIAL
  Primer
aagtgtgtgcattgccatcc

SEQ ID NO: 79 - DNA, 2333 bp, ARTIFICIAL
  Sequence of the IF-1 coding sequence and flanking regions.
tgtagaaagccaaggtgtaacaagggttacacctttttattatttttactcttctgaatctaagatttcatctttattgacatctgctggtggattatccgctaaccagttcgctaaacgtgcataatctgcgatagccaaattttctgcacgtgcatttaaatcaataccaagtgcggtcagattttcaggtgaaaatagagttgagagtgcattgcgtaatgttttacgacgttgattgaacgcttgggagcaaacacggttcaaccaatataaatcttttacagggtgcggcaattccttatgcggaattaaacgcacaacggctgaatctactttcggtgcaggtttgaatgccgaaggcggtacttcaagcacaggcatcacttggcagaaatattgcgccataatcgttaaacgaccataagctttgctatttggtgcggcacataggcgttttaccacttctttttgcagcataaagtgcatatcttgaatcacatcatgatatttaaacaagtggaacatcaatggcgtagaaatgttgtaaggtaagttaccaaacacacgtaatttttgccctttttctgctaaattttcttttgtgtaaagcgcaccaaaatcaaattgcatcgcatccgtttcaataacggtgagcttttgatgtaaaaatggatggtgacgtaaacgttctgcaaggtctcggtcaagctctaccacagtcagatgatcgacaagttcaccaacaggctctgttaatgcaccaagccctgggccaatttccactaagaattgattaggttgtgggtaaatcgccgccacgataccttgaatgacagaagtatcatgtaaaaagttttgaccaaagcgtttacgcgccgtatggcctaagtgtttttttgagttcataagtactatttaataagaaaagtgcggttattataggggttgttttagctttgtaaatcattgttaggttatgccaaattgagtttttcatgaacaatattattttttctttcgtagaaagctaaaaacggctataatccgcccgtttttcttaacttttccgcctaaagtgcggataaaaaatcgattatttttagaggatacaatggcgaaagaagattgcattgagatgcaaggcacaattttagagactttaccgaatactatgttccgcgtggagttggaaaacggtcacgtggttactgcacatatttctggaaaaatgcgtaaaaactatatccgtattttgactggggataaagtgactgtagaaatgacgccttatgatttaagtaaaggacgtattattttccgtagtcgttaattacagaagatttgagataggtcgatattgttacaatatcgaccttcttttttgttcaaaaagaactcaaactggttgcggagctwaaaaaatcggtataatccgcaacccttagccacattgaatttttcgttccttgcctttgcagattggtggctgatctacgtcaaaggctgattaacccgtaaggagcagtaatgcgtcactacgaaatcgtgtttatggttcatccggaccaaagcgagcaagtaccaggtatgatcgaacgttacaccggttctgtaaaagaagctggtggtcaagttcatcgcctagaagattggggtcgtcgccaattagcgtacccaattaataaattacacaaagcacattatgtgcttatgaatgtagaagcgcctcaacaagtcatcgacgagctagaaacgactttccgttataacgatgctgtattacgcagtcttgttatccatactaagcacgccgtaaccgaagcgtccccaatgaaagcggctaaagaagaacgtaaacctttagctgaagttgaaaacaacgattttgaggatgctgaagagtaatttgaaaattgataatagtttttcggttatgggagtcgtttctcggttaccaaagcgattaaagagccctagtggaattgagcattgcaagtttttgttagaacatcgttctgatcagattgaaagtggtttcacacgtcaagcttggttaaaaatgcctgttcaaattagtggtaatcaattgatagaaaaaactcaaagcattacggtcggtagtaaaattttggtggtgggatttattacatcacataaaacccaaagtgggttatgccaattagttttacatgccgagcaaatcgaatttatagattaggagactagccaaatggcacgttatttccgtcgtcgtaagttctgccgtttcacagcggaaaatgttgttgaaatcgattacaaagatatcgctacattaaagaactatattt

SEQ ID NO: 80 - DNA, 20 bp, ARTIFICIAL
  Primer
ccaagtgcggtcagattttc

SEQ ID NO: 81 - DNA, 20 bp, ARTIFICIAL
  Primer
acggcagaacttacgacgac

SEQ ID NO: 82 - DNA, 20 bp, ARTIFICIAL
  Primer
atccgcccgtttttcttaac

SEQ ID NO: 83 - DNA, 20 bp, ARTIFICIAL
  Primer
gacctatctcaaatcttctg

SEQ ID NO: 84 - DNA, 2925 bp, ARTIFICIAL
  Sequence of the IF-2 coding sequence and flanking regions.
ggcactgtaaaaaaagtaagtcgagacagtattattttagatcttggcaataaagcggaagcgatgattgcgcgtgaagatatgttaccacgtgaaaacttccgtccgggagatcgtgttcgtggggtactttataaagtaaatcctgaaggcaaaactgcacaattatttgtgacacgttctaaaccagaaatgttgatcgaattattccgtattgaagtgcctgaaattggcgaagaaatgattgaaattcgtggtgcagctcgtgatgctggctctcgcgctaaaattgcagtgaaatcaaatgataagcgaattgatcctgttggtgcttgtgtaggaatgcgtggtgcgcgtgttcaggtaattacgaatgaacttggtggcgagcgtgtagatatcgtgctttgggatgacaatcccgcgcaatttgtgattaatgcgatggcaccagcggatgtttcttctattatcgttgatgaagataatcattctatggatattgctgttgaagctgataatcttgctcaagccattggtcgtaatggtcaaaacgtgcgtttagcaacacaattaacgggttggacactaaacgtaatgacgactgatgagttaaatgctaagcatcaagcagaagataacaaagtgttaaatttatttattaacgcattagaacttgatgaagaatttgctcaaatccttgtggaagaaggcttcacaagtttagaagaaattgcttatgtgccaatgaatgaattgacagcaattgatggtttggaagatgaagatcttgttgaagagcttcaaactcgtgctaaaaatgcgattacagccgcagcagtagctgaagaagaagcactgaaaaaagcgaatgttgaagatcgtttattgaatttagagggaatgaatcgtcacgttgcaatcaaactagcagaaaaacaaattaccacccttgaagaactcgcagaacaaggcgttgatgatttaactgatattgaagaattaaccgcagaacaggccgcagatttaattatggctgcacgtaatatttgttggtttggcgaagaataaggagagcagtaatgactgaagatgttaaggctgatgcgccaaaaaaattaagcattcagcgcagaacaaaaacaacagtgagcagcaccacaactggcggtaaaagcaaagaagtacaagtagaagtacgtaaaaaacgcacagtaaaaactgatattgctcaacaagaagaagcaaaattaaaagcacagcaagaagcggaagcgaaaaaaattgctgaacaaaaagcagcagaagaaaaagctcgtttagaagctgaaaaagcaaaagctgaaactgctaagccagtaaaaagtgcggtagattctaaagctaaatctgttgagtctgaaaaagagaaacgtaaagcaggagaagcagaacttcgtcgtaaagctgaagaattagctcgtcaaaaagcagaagaacaagctcgtcgtgcagtagaagaagcgaaacgttatgctgaagcagatgattcagacaatgaatcttcttcagaagactattctgattacaatctaagttcaagatatgcacttgaagcagaagatgaagaagatcgtcgtaatgaaaatcgtggtcgtggcaaaaataaagtagcgaaagcgaaaaaaggcggtcgcgacgatgaaaatagcaaaaactcgaaaaacgagcgcgaatctaatcgtaaaaatcaaaaagacgctaagtttggtaaaggtaaaaatggcaaaaaaggtgccgcacttcaacaagcctttactaaacctgctcaagtagttaaatcggatgtagtcattggagaaaccattacggttgcagaacttgcgaataagatggcggtaaaagctacagagatcatcaaaatgatgatgaagatgggcgaaatggttactatcaaccaagttatcgaccaagaaaccgctcaattagtagcagaagaacttggtcataaagtgattcttcgtaatgaaaatgagcttgaagaagcggtattaggcgatcgtgatgtaaacgcagaaaaagtaacccgtgcgccagttgtaaccatcatgggtcacgttgatcatggtaaaacctctttacttgactatattcgtaaagcgaaagttgctgcaggcgaagcgggtggtattactcaacatatcggtgcgtatcacgtagaaatggatgatggcaaaatgatcaccttcttggatactccaggacacgcagcgtttacttctatgcgtgcacgtggtgcaaaagcaacagatatcgttgttcttgttgttgcggccgatgatggtgtgatgcctcaaactatcgaagcgattcaacacgcaaaagcagcgggtgcacctttagtggttgcagtaaataaaatcgataaaccagaagcaaatctagatcgtgttgagcaagaattattacaacatgatgtcatttctgagaaattcggtggtgatgtgcaattcgttccagtatcggcgaagaaaggtacaggggttgatgatttattagatgcaatcttacttcaatctgaagtgcttgaattgaccgctgtaaaagacggcatggcaagtggtgtagtcattgaatcttacttggataaaggtcgtggccctgtggcaactatcttggttcaatcaggtacactacgtaaaggtgacatcgtactttgtggttttgaatatggccgtgtgcgcgcaatgcgtgatgaaaacgggaaagaagtggatgaagcaggtccttcaattccagttgaattattaggtctttcaggcgtgcctgcagcgggtgatgaagcaactgttgtgcgtgatgagaaaaaagcacgtgaagtggcgttatatcgtcaaggtaaattccgtgaagtgaaattagctcgtcagcaaaaagcgaaacttg

SEQ ID NO: 85 - DNA, 20 bp, ARTIFICIAL
  Primer
gcgcgtgaagatatgttacc

SEQ ID NO: 86 - DNA, 20 bp, ARTIFICIAL
  Primer
ctcatcacgcacaacagttg

SEQ ID NO: 87 - DNA, 20 bp, ARTIFICIAL
  Primer
gactgaagatgttaaggctg

SEQ ID NO: 88 - DNA, 20 bp, ARTIFICIAL
  Primer
acgtgatacgcaccgatatg

SEQ ID NO: 89 - DNA, 2400 bp, ARTIFICIAL
  nucleotide
  misc_feature (59)..(59): n=nucleotide
  misc_feature (1854)..(1854): n=nucleotide
acatgcggttggaacaccaaaaatttcccctgcaaggggcacagcttatcagttggaancccccaaaatgcgaagcaagatgtattatggctaagtgaagtagagccattcaaaaatggcaatgctattcgtggtggtgtaccgatttgttatccttggtttggtggcgtaaaacaacctgcgcacggtacagctcgtattcgtttatggcagttgagtcattactatatttcagtgcataaagtgcggttagaatttgagttgttttctgatttaaatattatcgaagctaaagtctcaatggtatttacagataaatgtcatttaacttttacccattatggcgaagaatcagcccaagcagcattacatacctattttaatattggggatattaatcaagtggaagtacaaggtttacctgaaacttgttttaatagcttaaaccaacaacaagaaaatgttccgtcaccgcgtcacatttctgaaaatgttgattgcatttattctgcagaaaacatgcagaatcaaatcctagataaaagtttcaatcgtacaattgcactgcatcatcataatgcaagccaatttgttctttggaatccttggcacaaaaagacgagtggaatgagtgaaactggctatcaaaagatgttgtgcttagaaactgcacgtatccatcacttgcttgaatttggcgaaagtttaagcgtagaaatttcgcttaaaggctaaattttgttgcataagtggtgtgaatactatagaattcgcgagactttgctcgttccttgcgggcaacaaatttgaaatcttttatttttagcgaaaagatttttactattaaccaatagaaggaatacgattattaaaaccgtaaaaaaagcaccggcagtaaatcgcccaaaccgtatcaatgaagagattcgtgtaaaagaagttcgtttaattgaccaaaatggtgaacaagcagggattgtttctattcaacaagccctagaaatggcagagcaagcagagcttgatcttgttgaaattagcccaaatgcagagccgccggtttgtcgcattatgaactacggtaaattcctttacgaaaaaagtaaaaccgctaaagaacaaaagaaaaaacaaaaagttgtccaagttaaggaaattaaattccgcccaggcacagacgaaggtgactatcaagttaaattacgtagcttaatccgtttcttagaagacggtgacaaagcgaaaattaccgtgcgtttccgcggtcgtgaaatggctcatcaagacatcggtttagatgtgttagagcgcgtaaaaaatgatttagctgaaatttcagtggttgaatctgcaccaggtaaattagaaggccgtcaggctgtaatggtgttagcaccgaagaaaaaataagaattttgctgagatttttcagcaaatctttttgtttaagtttgacttaaatgaaaagacaactgcatgttgggcacactacgcagcctaactgcttttgaaaaggcgatttaatttgccttatgatggaaatgatcagtgcttccaagtaactttataagttcgcctgattatgttgttttaaacgaaaaatgcggagttattttaacaatgcctaaaatcaaaacagtacgcggcgcagcgaagcgcttcaaaaaaactgcttctggtggtttcaagcgtaaacaatctcacttacgtcatattttgactaaaaaaacaactaaacgtaaacgtcatttacgtcataaatcaatggttgcgaaagcagaccaagttttagtagtagcttgcttaccatacgcataagccgttatttaagcaaaacgtacgattagttcattnttagaaaaatattacataggagattaaataatggctcgtgtaaaacgtggtgttattgcaagagcacgccataagaaagttcttaaggctgctaaaggttattatggtgcacgttcacgcgtgtatcgcgttgctttccaagcggtgatcaaagctggtcaatacgcataccgtgaccgtcgtcagcgtaaacgtcaattccgtcaattatggattgcacgtatcaacgctgcagcgcgtcaaaatggtttatcttatagcaaatttatcaacggcttgaaaaaagcatctgttgaaatcgaccgtaagattcttgctgatatcgctgtattcgacaaagtagcgttcgctgcattagttgaaaaagcaaaatctgcactttaattttttaaagtttagataaagaagaattaggacgctgaaaagcgtcctttttttgcacttatgactttaaattttgtaaaataatgccattagttctcatctgttaaaatctatggccgaaacaatcccactgaatcctatcacgttgcctttaaatcaaat

SEQ ID NO: 90 - DNA, 20 bp, ARTIFICIAL
  Primer
cgaagcaagatgtattatgg

SEQ ID NO: 91 - DNA, 20 bp, ARTIFICIAL
  Primer
taacagatgagaactaatgg

SEQ ID NO: 92 - DNA, 20 bp, ARTIFICIAL
  Primer
tggtgaacaagcagggattg

SEQ ID NO: 93 - DNA, 20 bp, ARTIFICIAL
  Primer
cggtgctaacaccattacag

SEQ ID NO: 94 - DNA, 2885 bp, ARTIFICIAL
  Sequence of the ispA coding sequence and flanking regions.
atataactcgatacgcctgaatcaaatccccccgaaattaaagaaagcacatcctcttgagtcccaatcggataaccgccaatcccagcgtgacgtgctttaactaacatcattttgtcatcttcaatatcaatacgaacagttacatctggatttttcaaccgcacttttgcgctttcaatatattgatttaatccaccgccgatataacgttctgcttcaattgaactaaatttatgttttcctttacgttttactcgaacgcaaaaggttttgtcttgaagttgttgtgcgacatcagcaagcgtcaattcaaaaatatgatgtaaatcggtaaatggtttttcttcaacttctaaaaaatgatgaataccaggaatacgttgtaacaaggcgattaattcttcacgattttcttcattttttgaccgcacttcaatgtaatcccagtggcgtacaactgcggtttcttcatcatatttctgtaaaatattgcggatattagaggttaaaatttttgcgaaacgtttacgcacagtttcgctcttaatcatgatttcaggaaaaagtttaacgataaatttcatataaatagcttaggtatttcttggggatttaaagtggcgagtattttacgcaaagatagtgaaaagtccactggtcctagcttgaaataattttttaacaactcaagtaaaatacagtacaatggcaaacaatttttaccgtgaataaaggataattccatggcgcgtaaacccgcatcttcacaagattttgaaacaacgttagtgcagttagaaaatattgttacacatttagaaaatggcgatctaccgttagaagaagcgttaaaagaatttgaacaaggtgtgcaattagctaagttagggcaagaacgtttacaacaagcagaacaacgtattcagatcttattgcaaaaaacagaagacgcgccactgaatgattataaagggaatgattatgaagggaatgcttaatgggtcacttttctgaagaattacaacaggttcaaactcgtatcaatcgctttttagaagctcaatttgaaggcattgaaagtcataatgcgcctttgcttgaggcgatgaaatacgcattattacttggcggtaagcgagttcgccctttcttagtttacgcaacaggtcaaatgcttggcgcagagaaacaaaccttagattacgctgctgctgccattgaagccattcacgcctattccttaattcacgatgatttacctgcaatggatgatgacaatttacgccgtggacatcctacttgtcatatccaatttgatgaagctacagctattcttgcgggcgatgcactgcaaagtttcgcatttgaaatattaaccaaaacaccgaatatttctactgaacaaaaactggctttaattcaaattttagcgcaaggcgctggtgtgcaaggaatgtgtttagggcaaagtttagatcttatttctgagcataaacagattagtttaagtgaattagaattaattcatcgtaacaaaacgggtgcattgctaattgccgcattgaaattaggtttcatttgttctccgcattttaccgacaaaaggttagaacaatccttaacacaatatgcggaagccattggtttagcctttcaagttcaagacgatattttagatattgaaggcgatagtgcagaaattggcaaacaggtgggtgccgatcttgatttagataaaagtacatatccaaaattacttggattaagtggtgcaaaacaaaaagcgcaagatctatatcaaagtgcgttgtctgaattagaaaaaattccttttgatacaaccgttcgtgcattagctgaattcattattaccagaaaaagttaaatacccacaaaagtgcggtcaaaatttatcacgtttttaaaatgactaacaatatgaacaattatcctcttttatctttaattaattctccagaagatttgcgtcttttaaataaagatcagctaccacaactctgtcaagaattacgtgcttatcttttagaatctgttagtcaaactagcggacatttagcgtcaggtttaggcactgtagagctaaccgttgcgctgcattatgtatataagacgccatttgatcagttaatttgggatgtgggacatcaagcttatccacataaaatcctaacgggtcgccgagagcaaatgtccacaattcgccaaaaagacggtattcatccttttccttggcgtgaagaaagtgaatttgatgtattaagtgttggtcactcctctacgtctattagtgcgggattaggcattgccgttgccgcagaacgagaaaatgcaggtagaaaaacagtatgcgtaatcggtgatggcgcaattactgcgggaatggcatttgaggcattaaatcacgcgggggcattgcatacagatatgttagttattttaaatgataacgaaatgtctatttcagaaaacgttggtgcattaaataatcatcttgcgcgtattttctctggctctctttactctacgcttcgtgatggcagtaaaaaaatccttgataaagttcctccaatcaaaaattttatgaaaaaaaccgaagaacatatgaaaggtgtaatgttttcgccagaaagtacattatttgaagaactcggttttaactatattggcccagtggatgggcataacattgatgaattagtggctacgcttacgaatatgcgtaatctgaaaggcccacaatttttgcatataaaaacgaaaaaaggtaaaggatacgcacccgcagaaaaagatccgattggtttccacggtgtacctaaatttgatccaatcagtggcgaattgcccaaaaacaatagtaa

SEQ ID NO: 95 - DNA, 20 bp, ARTIFICIAL
  Primer
aagcacatcctcttgagtcc

SEQ ID NO: 96 - DNA, 21 bp, ARTIFICIAL
  Primer
gcatattcgtaagcgtagcca

SEQ ID NO: 97 - DNA, 20 bp, ARTIFICIAL
  Primer
attacttggcggtaagcgag

SEQ ID NO: 98 - DNA, 26 bp, ARTIFICIAL
  Primer
tctggtaataatgaattcagctaatg

SEQ ID NO: 99 - DNA, 2987 bp, ARTIFICIAL
  Sequence of the ispB coding sequence and flanking regions.
atacgatagtttgcgcattcattacagacaaaacttgtttcaaggcaataggcaatgacccccaagccatagcggtaataagcgcaaaggtaaagcctaataaaggttgttgtttcattgtttgctcgcttatgtgaaattaaaaaagacaaaacgccccakaaaattgtagggcgtttcaatggaatagattttaaattattcagtaacaataactacgtatttacggcttttctcgccttttacttcaaatttaactttaccatctgcggttgcgaataaggtgtgatctcttcccattcctacgttgttacctgcgtggaatttagtaccacgttggcgaacgataatgctacctgctaatacagattcgccaccgaaacgtttaacaccaaggcgtttagcttcagaatcgcgaccgttacgagttgaaccaccagcttttttagttgccatctacttgatctcctctgaaattatgcttgaatcccagtgattttcacttctgtgaaccactgacgatgaccttgttgtttacggctgtgtttgcgacgacggaatttaacgattttaactttctcgccacgaccttgtgcaacaacttcagccactacttttgcaccagcaactactggcgcaccaattttaacatcttcaccattaacgaccatcaacakagaatcgaactcaactgttgcgccagttgcaagttcaagtttttctaaacgaacaacttgaccttcgctcacacggtgttgtttaccgccactttggaaaactgcgtacataaatactccgcttaattgtgttttcctgctttttagcagtccacacttaaaaattcatataaataggtcgcaaattctacggaaaaatcctacctatggcaagattttatttataataaaataaaaaaattcccttcatttgcggattgatttcagaaagtctgaaaattcgggtaaaatgcaccgcacttttaactgataaatgatgaaaaatgaagaaacaagatcttatgagcatagacgagatccagaaacttgcagatccagatatgcaaaaagttaatcaaaatattcttgctcagcttaattcagatgtaccgctaataggacagttaggtttttatattgttcaaggtggtggtaagcggatccgtccgttgatcgcagttctcgcagcacgatctttagggtttgaaggatctaattcaattacttgtgctacttttgttgaatttattcataccgcttctttgttacacgatgatgtcgtagatgaatctgatatgcgtcgtgggcgtgctacggcgaatgctgaatttggtaatgcagcgagtgtgttggtaggcgattttatttatacgcgtgcatttcaattagttgcacagttagaatcattgaaaattttaagtattatggctgatgcgactaatgttttagcggaaggcgaagttcagcagttaatgaatgttaatgatcctgaaacgagcgaagctaattatatgcgtgtaatttatagcaaaactgcccgtttgtttgaagtggctggtcaggctgcggcaattgtcgccggtggaacagaagctcaagaaaaggctttacaagattatgggcgttatcttggcactgcatttcagctcgtggatgatgtattggattatagtgcaaatacgcaagctctaggtaaaaatgtaggcgatgatttagctgaaggaaaaccaacccttcctctactacacgctatgcgtcatggaaatgctcaacaggcagctttaattcgcgaagcgattgagcaaggtggtaaacgtgaagcaattgatgaagtattagctattatgactgagcataagtctttagattatgcaatgaatcgtgcaaaagaagaggctcaaaaagcagtggatgcaatcgaaattttgccagaaagtgaatataaacaagcgttgatttcattggcatatttgtctgtagatagaaattattagtccataatttagcttatatacttgatacccattaattttaattaaactttatgaatacagaacttcaacctaaactagaaaaaagtgcggtcaattttcaagctaaaccgcgaaaacaaaaaatccgtaaggatcctaacgcaccttttattcgtgaaaaacttgagttgccagatggacacaataagctccttttgcattcttgttgtgcgccttgctctggcgaagtgatggaagcaattcttgcatcaggcattgaatttacaatttatttttataatccaaacattcatccactcaaagaatatttgattcgtaaagaagaaaatatccgttttgcaaaaaaatttggtattccatttattgatgctgattacgatcgtcaaaattggtttgatcgtgctaagggtatggaatgggagcctgaaagaggtattcgctgcacaatgtgttttgatatgcgttttgaaaaagctgctgaatatgctcataaacatggtttccctgtatttactagttgcctaggtatttctcgctggaaggatatgaatcaaatcaatggctgtgggcatcgtgctgcggaaaaatatgatgatgttatttattgggattataactggcgcaaggaaggtggctcgcaacgcatgattgaaattagtaagcgtgagcggttttatcaacaggaatattgcggttgtgtgtattctttacgtgatagtaataaatggcgagaagagacgggtcgtcaaaaaattgaaatcggaaaattatattatagtgctgattaaaaatagaaaaataaaggtgttgtttcacagaatttgctgaacagcaccttttatttcactattttatcacttcatcttgatcataatgattaatttttaaacgttgaaaataatcttttgtttcttcaatgatcacttttcgcaatccaataagcgcgataagatttgggaaagccatcaaaccatttacaatatcggcgataatccat

SEQ ID NO: 100 - DNA, 20 bp, ARTIFICIAL
  Primer
caaggcaataggcaatgacc

SEQ ID NO: 101 - DNA, 20 bp, ARTIFICIAL
  Primer
atgcgttgcgagccaccttc

SEQ ID NO: 102 - DNA, 20 bp, ARTIFICIAL
  Primer
ccgctaataggacagttagg

SEQ ID NO: 103 - DNA, 20 bp, ARTIFICIAL
  Primer
tcttgagcttctgttccacc

SEQ ID NO: 104 - DNA, 2665 bp, ARTIFICIAL
  Sequence of the nusA coding sequence and flanking regions.
ggctcataacccgaaggtcgttggttcaaatccagcccccgcaaccaataataagttcagtaaaagaaccccagttttggggtttttttctataagaaatttagtaactgggcttaggttcttatgaacctaaccctttttttatgcctgagatttaataaactatctttttactattactaaaatagagggataagtattgtttaggataaggtttcataaggttatgatatagtgcggtgaattacaccctatataggagtagaaattggctacattagaacaaaatttacaagaaatgctacaagatgcggtagaggatttaggctgtgaattgtggggaattgagtgccagcgcgtgggtcgttttatgacagttcgtttatttatagataaagatggtggtgtgacagttgatgattgtgctgatgtaagtcgtcaagtgagtgcaattttagacgtggaagatccaattgcggataaatataatctagaagtgtcgtcacctggtttagatcgtccgctatttaccttgccgcaatttgaacgctatattgggcaagatatcgcagtgcatttgcgaattccagtgatggaacgccgtaaatggcaaggtaagttagagcgtattgaaaaggatatgattactttaattgttgatgatcaagaacaaattttagtcttcggaaacattcaaaaagcgaatgttgttgcaaaattttaaaaggagaaaaagagaaatgagtaaagaaattttactggcggcggaagctgtatccaatgaaaaattattaccacgtgagaaaatttttgaagcattagagagtgcgattgcgatttctactaagaagaagtttgaatatgaaacggatattcgcgtttcaattaatcccaaaacaggagaatttgatacttttcgccgttggttagtcgtagatgaagtaaaagtaccaacgaaggaaattactttggaagcggcgcaatttgatgatccaaatttgcaacttggagagtatgtagaagatcaaattgaatctattgcatttgaccgtattgcaatgcaaacggcacgtcaagttattagcactaaaattcgtgaagccgaacgtgcaaaagtggttgaacaatttcgtgaagaagaaggaaaaattgtaacaggcactgtaaaaaaagtaagtcgagacagtattattttagatcttggcaataaagcggaagcgatgattgcgcgtgaagatatgttaccacgtgaaaacttccgtccgggagatcgtgttcgtggggtactttataaagtaaatcctgaaggcaaaactgcacaattatttgtgacacgttctaaaccagaaatgttgatcgaattattccgtattgaagtgcctgaaattggcgaagaaatgattgaaattcgtggtgcagctcgtgatgctggctctcgcgctaaaattgcagtgaaatcaaatgataagcgaattgatcctgttggtgcttgtgtaggaatgcgtggtgcgcgtgttcaggtaattacgaatgaacttggtggcgagcgtgtagatatcgtgctttgggatgacaatcccgcgcaatttgtgattaatgcgatggcaccagcggatgtttcttctattatcgttgatgaagataatcattctatggatattgctgttgaagctgataatcttgctcaagccattggtcgtaatggtcaaaacgtgcgtttagcaacacaattaacgggttggacactaaacgtaatgacgactgatgagttaaatgctaagcatcaagcagaagataacaaagtgttaaatttatttattaacgcattagaacttgatgaagaatttgctcaaatccttgtggaagaaggcttcacaagtttagaagaaattgcttatgtgccaatgaatgaattgacagcaattgatggtttggaagatgaagatcttgttgaagagcttcaaactcgtgctaaaaatgcgattacagccgcagcagtagctgaagaagaagcactgaaaaaagcgaatgttgaagatcgtttattgaatttagagggaatgaatcgtcacgttgcaatcaaactagcagaaaaacaaattaccacccttgaagaactcgcagaacaaggcgttgatgatttaactgatattgaagaattaaccgcagaacaggccgcagatttaattatggctgcacgtaatatttgttggtttggcgaagaataaggagagcagtaatgactgaagatgttaaggctgatgcgccaaaaaaattaagcattcagcgcagaacaaaaacaacagtgagcagcaccacaactggcggtaaaagcaaagaagtacaagtagaagtacgtaaaaaacgcacagtaaaaactgatattgctcaacaagaagaagcaaaattaaaagcacagcaagaagcggaagcgaaaaaaattgctgaacaaaaagcagcagaagaaaaagctcgtttagaagctgaaaaagcaaaagctgaaactgctaagccagtaaaaagtgcggtagattctaaagctaaatctgttgagtctgaaaaagagaaacgtaaagcaggagaagcagaacttcgtcgtaaagctgaagaattagctcgtcaaaaagcagaagaacaagctcgtcgtgcagtagaagaagcgaaa

SEQ ID NO: 105 - DNA, 20 bp, ARTIFICIAL
  Primer
actgggcttaggttcttatg

SEQ ID NO: 106 - DNA, 20 bp, ARTIFICIAL
  Primer
agctttagaatctaccgcac

SEQ ID NO: 107 - DNA, 20 bp, ARTIFICIAL
  Primer
tttactggcggcggaagctg

SEQ ID NO: 108 - DNA, 20 bp, ARTIFICIAL
  Primer
cctacacaagcaccaacagg

SEQ ID NO: 109 - DNA, 2550 bp, ARTIFICIAL
  Sequence of the pth coding sequence and flanking regions.
tcatcaatgactaattcgcccatatcgtcaaaaattcggatcgattgattgggtttaaattcagtgcttgcatcacaccatttacccacttgccaacgacgatgaccatagccttgcactaaaaatacatcatattcatcataatgcttaccgacagaacctcctttcggtgcgtaagacaccataatgtcgtcacgttgccattgaggaataaagccaaatttgttccaaagttgtcctaattcaggcgaccattgctccaaattttgaactaacaccgaccatttttctggcaatttttggaaatccttttcgctcaaaggactaaaaaaaactttccaatcatcatcagaaaatgtcttcactaaacgagctgtcacatcttcattttgcgcgagctcaataatatcttgtggctcaaactgcccaacgatttcaggcaaaccgttccgaatcacaagtggctttttctgccaataatcacgtagaaaaatttctggcgtgatatgttcaggtaaacaaaaatcaacagatgaaagtgcggtcatttttaagctcctttttctttgtctttggctgcagcttgctctgctgcacgcttacggcgaatttctttcggatctgcaagtaatggacgataaatttcaatacgatcgccctcttttaatacatcagtcaattttattggacgactgaaaatcccaattttatttgtgctcaaatcaatctctggaaattggcttaaaatccctgattgcgtaatcgccgtttgcacggtaattccttcatcaacttgaaaagatttcaaataataacgttcgggaaaagcataagcgatttcaatgttaatctgattcatttttacttctttgttaaaaaattttagccattataacggaaaagtgcggtgacttttaatgataaatcacgcgcaataaattacctctttgtttccgccttatagattgagaatttaaggctttttcgctacaatacgccactattttttacatcatcaaataaaaatgtcagaaataaaacttattgttggtttaggcaaccctggcgataaatatacagatacacgccacaatgcaggcgaatggcttattgaacgcttggctcgtcgttttaacgtttcactaaatccagaaagtaaattcttcggaaaaactgcccgcactttagtgaatggaaaagaagtacgccttttagtgccaacaacttttatgaatttaagcggtaaagcagttggcgcattggcaagtttttaccgtattaaacctgaagaaattttagtgattcatgatgaattagatttaccaccaggcactgcgaaactcaaacaaggcggtggacatggtgggcataacggcttaaaagatattgtggctcaattaggcaataacaataatttctaccgtttacgtattggcattgggcatcctggccatcgtgatttagtggcaggttatgtcttaaataaaccatctccagcagatcgcgatgcacttgaaaaagtgctagatgaagccactgattgtgtagaaatgattttcagagatggaatggtcaaagcgaccaatcgtttaaacagttttaaaatttaaaagtgcggttagttttacaaccgttttactcaaaataagggaaaaattatgggattcaaatgtggtattgtgggattgccaaatgtcggcaaatctactctttttaacgcactcactaaagctggcattgaagccgcaaactatccattctgtactatcgaaccaaatacgggtgtcgtgccaatgccagatccacgtttagacgcattggcagaaatcgttaagcctgaacgcatattacctactacgatggaattcgtggacatcgcaggcttagttgcaggtgctagcaaaggcgaaggcttgggtaataaattcttagcaaatattcgtgaaaccgatgcaattggtcacgtagtgcgttgttttgaaaacgatgacattgtacacgttgcagggaaaattgacccacttgatgatattgacactatcaacactgaattagccttagcagacttagacagttgtgaacgagcaatccaacgtttacaaaaacgtgcaaaaggtggcgataaagaagctaaatttgaactttccgttatggaaaaaatccttcctgtgctggaaaatgcaggaatgattcgttctgttgggttagataaagaagaattgcaagcaatcaagagttacaacttcttaacgttaaaaccaacaatgtatatcgcaaacgtaaatgaagatggctttgaaaataacccatatttagatcgcgttcgtgaaattgctgcaaaagaaggggcggtagttgttccagtatgtgcggcgattgaatctgaaattgcagaacttgatgatgaagaaaaagtcgagtttttacaagatttaggcattgaagaaccaggattgaaccgagtaattcgtgctggttacgcacttttaaatcttcaaacttatttcactgctggcgtaaaagaagtacgagcttggacagtttcagtcg

SEQ ID NO: 110 - DNA, 20 bp, ARTIFICIAL
  Primer
ttcagtgcttgcatcacacc

SEQ ID NO: 111 - DNA, 21 bp, ARTIFICIAL
  Primer
atcgccgcacatactggaaca

SEQ ID NO: 112 - DNA, 20 bp, ARTIFICIAL
  Primer
ctttttcgctacaatacgcc

SEQ ID NO: 113 - DNA, 20 bp, ARTIFICIAL
  Primer
gtcgctttgaccattccatc

SEQ ID NO: 114 - DNA, 2820 bp, ARTIFICIAL
  Sequence of the tmk coding sequence and flanking regions.
aaataacaaagtatcaaaaataaaggggcttaattgccccttttgttgttttttattttctctttcttatagcttatgaagaaatttttaattgcgattttacttttaattttgattttagcgggcgtggcgagtttttcttattacaaaatgactgaatttgtaaaaacaccagtaaatgtgcaggcagatgaacttttaacgattgaacgtggcacaacaagttcaaaattagccacactttttgagcaagaaaagttaattgctgatgggaaattattaccttatttgctgaagttgaaacctgagttaaataaaataaaagcagggacttattctcttgagaatgttaaaactgtgcaagatttactggatttgctcaattccggtaaagaagtgcagttcaatgtaaaatggattgaaggaaaaacctttaaagattggcgaaaagatcttgaaaatgcaccgcacttggtgcaaaccttgaaagataagagtaacgaagaaattttcgcattacttgatttgcctgatattggtcaaaatcttgaactaaaaaatgtggaaggttggctttatcctgatacttataactatacgcctaaatcgacagacttagagctacttaagcgatcggctgagcgaatgaaaaaggcgttaaataaggcttggaacgagcgtgacgaggatttacctttagcgaatccttatgaaatgttgattttggcttctatcgtggaaaaagaaacgggtattgctaatgagagggcaaaagtggcatctgtatttatcaaccgtttaaaagcaaaaatgaaattacaaacggatccaacggtaatttatggtatgggcgaaaattacaatgggaatattcgcaaaaaagatttagaaaccaagacgccttataatacgtatgtgattgatggattgccgccaacgcctattgctatgccaagtgaaagttcgttacaggctgttgcgaaccctgaaaaaacagatttttattattttgtagcagatggttctggtgggcataaatttacccgaaatttgaatgaacataacaaagcggtgcaagaatatttacgttggtatcgcagtcagaaaaatgccaaataaaagtgcggaagaaaatatgaaaggaaagtttattgtcattgagggcttagaaggtgcggggaaaagctccgctcatcagtctgtagtgcgagttttgcatgaacttggtattcaagatgttgtgtttacgcgcgagcctggtggaacgccactggctgagaaattacgtcatctcatcaaacatgaaaccgaagaacccgtgacagataaagcagagttattaatgctttatgcggctcgtattcagttggtggaaaatgtgattaaacctgctttaatgcaagggaaatgggtagtgggcgatcgtcacgatatgtcatctcaggcgtatcagggtggtggacgtcaattagacccgcattttatgctcaccttgaaagaaaccgtattaggtaattttgagccagatctcacaatttatttggatatagatccgagcgtcggtttagcgcgagctcgtggacgtggcgagttagatcgtattgagcaaatggatttagattttttccatcgtactcgagcacgctatttagaattagtaaaagataatcccaaagcagtggtgattaatgcagagcagagtattgaacttgttcaagctgatattgaaagtgcggtaaaaaattggtggaaatcaaacgaaaaatgaccgcactttacccttggctaatgccaatttatcatcaaattgctcaaacctttgacgaagggttggggcatcatgctgtgctgattaaagctgattctggtttaggcgtagagagtttatttaatgcacttgcacagaaaataatgtgtgtagctcaaggcgataaaccttgtggtcaatgccattcttgtcatttaatgcaagcccatagccatccagattatcacgaattaagccccattaacggtaaggatattggcgttgatcaagtacgcgacattaatgaaatggttgcgcagcacgcacaacaaaacggcaataaagtggtgtatgtgcaaggggcggaacgtttaacggaagcggctgctaatgcattattgaaaacattggaagagcctcgtccaaatacttattttttacttcaagcggatagttcggcaagtttgttagcaactatttacagtcgatgccaagtgtggaatctttccgtgcctaatgaagaaattgcttttgaatggttaaaatcaaaaagtgcggtagaaaatcaggaaattttgaccgcacttgcgatgaatcttgggcgtccgcttttagcattagaaacgttacaagaaggatttattgaacagcgtaaaaacttcttacgtcaattttgggtgttctatcgccgacgttcgccattggaattgcttccgttgtttgataaagaacgctatgttcagcaagtggattggattttggcttttctttctgattgtttaaaacataaacttgaaattgatagtcatcgacaagtggctgatcttggccgtggtatcgaacaattcagcgacgagcaaactgcccttggtttattacaagccattaaaattatgcaaaaagtgcggtcagatttgcttacaattaatggtgtgaatgttgaattaatgctattggatggcttgacacgattagtcacagaagtatttgaaacgcaataaattaaagatatatcgtctatggcgttcaagccttaggcataaggaaaaataattatgttcattgttgactcc

SEQ ID NO: 115 - DNA, 20 bp, ARTIFICIAL
  Primer
acgattgaacgtggcacaac

SEQ ID NO: 116 - DNA, 20 bp, ARTIFICIAL
  Primer
gcttgaacgccatagacgat

SEQ ID NO: 117 - DNA, 20 bp, ARTIFICIAL
  Primer
cgttggtatcgcagtcagaa

SEQ ID NO: 118 - DNA, 20 bp, ARTIFICIAL
  Primer
atctaactcgccacgtccac

SEQ ID NO: 119 - DNA, 2878 bp, ARTIFICIAL
  Sequence of the trxB coding sequence and flanking regions.
attttccttttatcgttgagatcaacgaacaaaatcttactgaaatactgcaacaatccttaggaaaaaccacttgtcatcaatttttacgcgccaacgcataaagaatcggcggattttttggcactacttgagcaagttgcagaacaatatcaaggacaatttattcttggaaaagtaaattgtgaaaaagagcgaatgattgccgcacaattccgcatccaagcattgccaaccacctatttgtttaaagaagcacaggcattagatgcatttccaagcgtgcttgataaatcttcattaatccaacgattaagcattattttacctaaagaggaagatttaaaattccaacaagcattagatttcttacaagtagaaaattacgaagctgcattgccattattgaaagatgcgtgggaactttcagataagaaaaatagtgatgttgctctactctacgcagaaacctatattgcaatgaaaaaaacggagccagcacaagaaattttaaatcaaattccattgcaagatcgagacagccgttggcacggattacaagcacaaattgagctacaaattcaagcagccgatacacctgaaatccaacaattacaggctgattatgctaaaaacccaacagctgaaattgcaataaaacttgccgtacaacttcatcaagctggacgaaatgaagaagcattaacactacttttcggcattttaaaaacagatttaggcgcgcagaatggtgaagttaaacaacaatttttatctattttaagcgcaatgggcaatgctgatccgctgacaaataaatttcgtcgattgctttattcgctgctttactaagcaaaaagtttataatcagtaaaatgcaacttattgcattatattattacttaactacaaacaaggattctttatgtcagatatcaaacacgcaaaacttttaattttaggctcaggccctgctggttatacagcagccatttatgcggcacgtgcaaacttaaaaccagtattggtgactggtttgcaacaaggtgggcagctgaccactacagatgaaattgagaactggccgggcgattttgagatgactactggttcaggtttaatgcaacgtatgttgcaacatgcagaaaaatttgagacagaaatcgttttcgatcatatcaatcgcgtcgatttatcttctcgcccattcaaactttttggcgatgtgcaaaatttcacttgtgatgcgttaattatcgcaacaggtgcctctgcacgctatattggcttaccttcagaagaaaactacaaaggtcgtggcgtttctgcttgtgcaacctgtgatggtttcttttatcgtaataagcctgttggtgtcattggtggaggaaatacagcggtggaagaagccctttacttagccaatattgcaagtacagtgcatttaatccaccgtcgcgatagcttccgtgcggaaaaaatccttatcgatcgtttatacaaaaaagtggaagaagggaaaatcgttcttcatactgaccgcactttagatgaagtattgggcgataatatgggcgtaactggattacgtttagccaacacaaaaactggggagaaagaagaactcaaattagatggcttattcgtggcgattggtcattcgccaaatacggaaattttccaagggcaactagaattgaataatggctatatcgttgtaaaatctggtcttgacggcaatgcaactgccacttctgtggaaggcgtgttcgcagcaggcgatgtcatggatcacaattatcgccaagccattacctccgcaggaactggttgtatggcagccttggatgcagaacgctatttagatgctcaagaagcataaatcttctaaccaattcccctcttttaactcttttaaagaggggaactttttctataatcacgaccaaaacaatgaataaacttcgccaaaaatatttacaaaaatggcttcgcgcacaacaagaacctatcaaaaaattaatgcgtgcaaacattgtcttagctacgctttcttcattcattttagtcgcacaaacttattttcttgcgacgttgctcgataaactgattatgcaaaatgtgcctcgtgatgaacttattccttattttctcgggctaattatcggcttcgggatgcgtgctattattttatgggcacgcgaaaaaataggtttccaaagcggacaattattacgcaaccatattcgtcaaaaaattctggataaaatccatcttgtcggccctgcgacaatcaatcaaaaaccagctggaagttgggcaagcattatgttggaacaagttgaaaacttacataatttctatgcccgttttctgcctcaacaaagtctttcagccattgttccagtggttattttcattgctgtatttcccttgaactgggctgcaggcttaatcttaatgattaccgcaccgcttgttcctctgtttatgatcattgtcggtattgctgcggctgacaacagccaaaaaaatatggataccctttctcgcctcagtgcccaatttttagatcgcttacgtggtttggaaaccttgcgtctttttaaccgcacttctgaacaaacggagcatattgaaaatgccactgaagatttccgtgaaaccacaatggatgtgctaaaactcgcttttctctcttctgcagtattggaattttttacctctatttccattgcactgatggcggtctattttggttttagctacttaggtcaaattgaatttggtacctataatgcaccgcttacacttttcacaggtttcttttgtttaattcttgcacctgaattttatcaacccttacgcgatctaggca

SEQ ID NO: 120 - DNA, 20 bp, ARTIFICIAL
  Primer
cgcacaattccgcatccaag

SEQ ID NO: 121 - DNA, 19 bp, ARTIFICIAL
  Primer
tgtgaaaagtgtaagcggt

SEQ ID NO: 122 - DNA, 20 bp, ARTIFICIAL
  Primer
tcaggccctgctggttatac

SEQ ID NO: 123 - DNA, 20 bp, ARTIFICIAL
  Primer
agttcgattgccgtcaagac

SEQ ID NO: 124 - DNA, 2720 bp, ARTIFICIAL
  Sequence of the uppS coding sequence and flanking regions.
tctggacgcgtggtgtaaaccgccactttttcgttggtatttgcaacatcaaaggtaatttctaccccttcagagcgaccaatccagttacgttgcatggtttttaccatgtcaggccattgtggaagggtatctaaaccacctaataattgctctgcatagtcagtaattttgataaaccattgtgggatttctttttgttccactggtgtatcacaacgccagcaacaaccttcgtgtacttgctcgtttgcgagtactgtttcatcattcgggcaccagtttacggttgaggtttttttgtacactaagccttttttataaagctccgtgaagaaccattgttcccatttgtagtattctggtttacaggttgcgatttcgcgatcccagtcgaaaccaaagcctaaaagctgaagttgttttttcatgtaggcaatgttttcgtacgtccatttagcaggcgcagttttgtttttgattgcggcaccttctgctggtaagccgaaagcatcccaaccaaagggttgcaacacgtttttacctaacatgcgttgataacgagaaatgacatcaccaatagtatagttacgtacatgtcccatatgcaggcggccagaaggatatgggaacatagaaagacagtaatatttttctttagattcgtctttgattgctttgaaaactttattttctgcccaatattgttgaacctttggttcgatcatatcggggcgatattgttcttgcataaaatcaccttaaattttaaccgcacttttgcagcattttgacaatagaaaatgtggcatagaataccgtaaaatggcaaaaattaatagggagagaaataaaaagtgcggtggttttttagttgttttttacaataaattttcaatttttgcagaacagattagaacaaaggaattcatagcaagccaatataacttatgatatagtttaccaccaaatttatagaggtctctcaataataaaaataatgatagagttggatcaaacaaatataccaaaacacgttgccattattatggatggtaatggccgttgggcaaaacagaaaaataaaatgcgaattttcggacacaccaatggcgttactgcggtacgcaaagcagtggcttatgcacgacaaatcggtgtggaagtactcacactttatgcctttagtagcgaaaattggagtcgcccagaacaagaaatcagcgcgttaatgtcgctttttatgcaagccttggatcgcgaagtgaaaaaattacataaaaataatatttgtctgaaaattataggcgatgtatctcgttttagtgaaactttacaagaaaaaatcaaaaaagcggaaaatttaacagaaaaaaataccgcacttacactcaatattgcggcaaattacggcggttgttgggatattattcaagccgctaaacaaattgcagaaaaagttaaaaaagaagaaatgtcagtttcagatattaataactcgacttttcaacatcatcttgcaacccaaaatgcaccacctgtggatttattaattcgcaccagtggagaacagcgcataagcaactttttattatggcaaattgcctatgcggaattatatttttccgatgtgctttggcctgattttaatcaattagaatttaatcgcgcgattgcaagttatcaacaacgtcatcgccgttttggcgggactgaatagttaaacggattaaaattatgcttaaacaacgagttttatctgctattgtgttaattgctgcagttttatgtgcgctatttttattcacacctttttattttgccctcgctttaggggcagtagcgattttaggcatttgggaatggactcaatttgctcgcctaaaacaacctttgatacgtttttttgtgactacctttttaggcgtatttatcttcttatggctctatactgagggcaactatttagatgcagggcgtgtgtttgaacaacatcttcagcttttattgataaatgctgttagctggtggggtttagctttgttacttgtgatcagttaccctaaatcagctaaattttggtctaaaaatccacttttacaacttttatttgccttttctacgttgattccatttgtcgcaggtgtattacgtttacgtttagaacactatacccatgatccttatcacggcttatttttattactttacgtatttatacttgtttgggcggctgattctggtgcttattttagcggacgcgcctttggcaaacgtaaacttgcccctaaagtatcgccaggtaaaagttgggaaggggtcattggtggcttaattacagcattagtgcttgcttttatctttattcatttctctaacaatactttagtaggcgatcgaaatattactggatttatcattctttctgtagccacagttgcaatttcagtattgggcgatttaactgaaagtatgtttaaacgtgagtcaggagttaaagacagcagtcaattaattccaggtcacggcggcgtattagatcgcattgacagcttgactgccgcggtaccttttttcagctatttctatttctttgtcttataaggatttttaatgtcatttttgtggtcactaggttcttttatcattgctattgctgtattagtatccgttcacgaatatggtcacttttgggcagcgagaaagtgcggtataaaagt

SEQ ID NO: 125 - DNA, 20 bp, ARTIFICIAL
  Primer
agagcgaccaatccagttac

SEQ ID NO: 126 - DNA, 21 bp, ARTIFICIAL
  Primer
ccaaaagtgaccatattcgtg

SEQ ID NO: 127 - DNA, 20 bp, ARTIFICIAL
  Primer
atataccaaaacacgttgcc

SEQ ID NO: 128 - DNA, 21 bp, ARTIFICIAL
  Primer
ggcgatgacgttgttgataac

SEQ ID NO: 129 - DNA, 2255 bp, ARTIFICIAL
  Sequence of the L27 coding sequence and flanking regions.
ttcgccttccgctaaaacattagtcgcatcagccataatacttaaaattttcaatgattctaactgtgcaactaattgaaatgcacgcgtataaataaaatcgcctaccaacacactcgctgcattaccaaattcagcattcgccgtagcacgcccacgacgcatatcagattcatctacgacatcatcgtgtaacaaagaagcggtatgaataaattcaacaaaagtagcacaagtaattgaattagatccttcaaaccctaaagatcgtgctgcgagaactgcgatcaacggacggatccgcttaccaccaccttgaacaatataaaaacctaactgtcctattagcggtacatctgaattaagctgagcaagaatattttgattaactttttgcatatctggatctgcaagtttctggatctcgtctatgctcataagatcttgtttcttcatttttcatcatttatcagttaaaagtgcggtgcattttacccgaattttcagactttctgaaatcaatccgcaaatgaagggaatttttttattttattataaataaaatcttgccataggtaggatttttccgtagaatttgcgacctatttatatgaatttttaagtgtggactgctaaaaagcaggaaaacacaattaagcggagtatttatgtacgcagttttccaaagtggcggtaaacaacaccgtgtgagcgaaggtcaagttgttcgtttagaaaaacttgaacttgcaactggcgcaacagttgagttcgattctmtgttgatggtcgttaatggtgaagatgttaaaattggtgcgccagtagttgctggtgcaaaagtagtggctgaagttgttgcacaaggtcgtggcgagaaagttaaaatcgttaaattccgtcgtcgcaaacacagccgtaaacaacaaggtcatcgtcagtggttcacagaagtgaaaatcactgggattcaagcataatttcagaggagatcaagtagatggcaactaaaaaagctggtggttcaactcgtaacggtcgcgattctgaagctaaacgccttggtgttaaacgtttcggtggcgaatctgtattagcaggtagcattatcgttcgccaacgtggtactaaattccacgcaggtaacaacgtaggaatgggaagagatcacaccttattcgcaaccgcagatggtaaagttaaatttgaagtaaaaggcgagaaaagccgtaaatacgtagttattgttactgaataatttaaaatctattccattgaaacgccctacaattttmtggggcgttttgtcttttttaatttcacataagcgagcaaacaatgaaacaacaacctttattaggctttacctttgcgcttattaccgctatggcttgggggtcattgcctattgccttgaaacaagttttgtctgtaatgaatgcgcaaactatcgtatggtatcgtttcattattgctgcagtttcattattggctttacttgcttataaaaaacaattacctgaattaatgaaagtccgccaatatgcgtggattatgcttattggagtaattggtcttaccagcaattttctattatttagtagctcgctgaattacattgaaccgtcagttgcacaaatttttattcatttatcctcttttggaatgctcatctgtggtgtactgattttcaaagaaaaattagggttgcaccaaaagatcggacttttcttattattaattggtttaggcttattctttaatgatcgttttgatgcatttgctggactaaatcagtattcaacaggtgtcattttaggtgtagggggtgctcttatttgggtcgcttatggaatggcgcaaaaattaatgttacgtaaatttaattcacaacaaatcttgctaatgatgtatttaggttgtgccatagcctttatgccgatggctgacttctcgcaagtacaagaactcacacctttagctctgatttgttttatttactgctgtttaaataccttaattggatacggctcttatgcggaagcacttaatcgttgggatgtatcaaaagtcagtgttgttatcacacttgtacctcttttcacgatcctattttctcatattgcgcattattttagcccagcagattttgcggcaccggaattgaataatattagctatattggcgcatttgttgtagtatgcggagcaattttatccgcaattggacataaattattaccgcataaaaatca

SEQ ID NO: 130 - DNA, 20 bp, ARTIFICIAL
  Primer
gcctaccaacacactcgctg

SEQ ID NO: 131 - DNA, 20 bp, ARTIFICIAL
  Primer
ttccgcataagagccgtatc

SEQ ID NO: 132 - DNA, 20 bp, ARTIFICIAL
  Primer
tcgtcagtggttcacagaag

SEQ ID NO: 133 - DNA, 20 bp, ARTIFICIAL
  Primer
agggcgtttcaatggaatag

SEQ ID NO: 134 - DNA, 3075 bp, ARTIFICIAL
  Sequence of the lepA coding sequence and flanking regions.
ttcttgtgggggataaatcgttttcccgcttgctcttgcaagatgaacctgttgtagtgtgtgttgaaagtaaggttgcgctttttctgttccgataacgtctgtccagtttttcattattttatcctattaataagtttttattcattataaacaaaaacattcattcaataaaaagttaaattaatgttaaattattgatataaattttatttaaaaattaatgaattttaatttagatcaaatttataaaaattaattaaaaaaataacctgctctttatcaaataaatataaaataatttgaaatattaaaatgatttgataaaatttgtacagttttattattattttcgtgccaattaggaggctattatgattaaaggtattcaaattactcaagcagcaaatgacaatttgcttaattcattctggttattagacagcgaaaaaaatgaagcacgttgcttatgtgcaaaaggcgaattcgctgaagaccaagttgttgcagttagcgaattaggtcaaatcgaataccgtgaattaccagtaaacgtagcaccaactgttaaagttgaaggtggccaacacttaaacgtaaacgtattacgtcgtgaaacgttagaagatgcggtaaacaatccagataaatatccacaattaactatccgtgtttctggttacgcagtacgtttcaactctttaacgccagaacaacaacgcgacgtgatcactcgtactttcactgaaagcctataatttcagtttgaatgaaaaaagaaaccccgaagttattcggggttttgttttatctaaaaagtttgaaaatttgaccgcacttttccctttcatccctagcgatttccgcgcttttcaggtacaatccgccagttaaatttaatgatttttgagaaaaacaatcttttatgaagaatattcgcaacttttctattattgcccatattgaccacggtaaatcgacactttctgaccgtttgattcaaacttgtggtggcctttcggatcgtgaaatggaagcgcaagtgctagattcaatggatcttgagcgtgagcgtggaattaccatcaaagcacaaagtgttactttaaattataaagccaaagatggcgaaacttatcaattaaactttatcgatacaccaggacacgtggacttttcctatgaagtgtctcgctctcttgctgcttgtgaaggggcattgttggtagttgatgctggtcaaggggtagaagcccaaactctagcaaactgttatactgcaatcgaaatggatttagaagtagtaccgattttaaataaaatcgacttaccagctgctgatcctgaacgcgtcgctgaagaaattgaagatattgttggaattgatgcgatggaagcggttcgatgctcagctaaaacgggtgtaggtatcgaagatgtattagaagaaatcgtggcaaaaattcctgcaccagaaggtgatcctaatgcgccattacaagcattgattattgattcttggttcgataattatttgggcgtggtatctttagtgcgtattaaaaacggggtattacgtaaaggcgataaaattaaagtgatgtccacagggcaaacttataacgtagatcgtttagggattttcacgccaaaacaagaagatactaccgttttagaatgcggcgaagtgggttgggttgtttgtgcgattaaagatattttaggtgcgccagtgggcgataccttaacccatcaacataattctgcaactgaggttttaccaggctttaaaaaagtaaaaccacaggtttatgctgggcttttccctgtaagttctgatgattatgaagcgtttcgcgatgcacttggtaaattaagtttaaacgatgcgtcacttttctatgaaccagaaacttcgaccgcgcttggttttggtttccgttgtggtttccttggacttctgcatatggaaatcattcaagagcgtctagagcgtgaatacgatcttgatttgattaccacagcaccaactgtaatttatgaagttgaaatgaccaatggtgaagtggtttatgtggatagtcctgcaaaattgcctccacttaataatattgctgaaattcgcgagccaatcgcagaatgtaatatgctggtgccgcaagaatatttaggtaacgttattaccctttgcgttgaaaaacgtggcgtgcaaaccaatatggtatatcacggtaatcagattgcgctgacttatgaaattccaatgggcgaagtggttttagatttctttgatcgtttaaaatcaacatcgcgtggttatgcttcgttagattacggttttaaacgtttccaagcggcagatatggttcgcgtggatattatgattaacagcgaacgagtagatgcgttggctttaatcgttcataaagataattcacaatatcgtggtcgtgaattggttgaaaaaatgcgtgagttaattcctcgtcagcaatttgatatcgctattcaagcagcgattggaaaccatattattgctcgttctacggtgaaacaattacgtaaaaacgtattagcaaaatgttatggtggtgacgtgagccgtaagaaaaaactcttacagaagcagaaagaagggaaaaaacgtatgaagtctttaggtaacgtagaagtgccgcaagaggcgtttttagcaattttacacgtaggaaaagataaataaggaaaattatgtcaaatttattttttgtgattttattggctgtcggctttggtgtgtggaaagttttagattattttcagttaccaaatacttttagtattttgttactaattttgaccgcactttctggcgtattatggtgttatcatcgttttgtggtgctgccaaaacgtcatcgtcaagtggcacgtgcagaacaacgttctggtaaaaccttaagtgaggaagaaaaagccaaaattgaaccgatttctgaggcttcagaatttttgtcttcactttttcctgtgcttgcagtggtatttttggttcgttcttttttgtttgaaccgtttcaaattccctctggctca

SEQ ID NO: 135 - DNA, 20 bp, ARTIFICIAL
  Primer
ttccgataacgtctgtccag

SEQ ID NO: 136 - DNA, 20 bp, ARTIFICIAL
  Primer
aataccactgcaagcacagg

SEQ ID NO: 137 - DNA, 20 bp, ARTIFICIAL
  Primer
attgcccatattgaccacgg

SEQ ID NO: 138 - DNA, 20 bp, ARTIFICIAL
  Primer
gttataagtttgccctgtgg

SEQ ID NO: 139 - DNA, 888 bp, ARTIFICIAL
  ispA gene sequence
atgggtcacttttctgaagaattacaacaggttcaaactcgtatcaatcgctttttagaagctcaatttgaaggcattgaaagtcataatgcgcctttgcttgaggcgatgaaatacgcattattacttggcggtaagcgagttcgccctttcttagtttacgcaacaggtcaaatgcttggcgcagagaaacaaaccttagattacgctgctgctgccattgaagccattcacgcctattccttaattcacgatgatttacctgcaatggatgatgacaatttacgccgtggacatcctacttgtcatatccaatttgatgaagctacagctattcttgcgggcgatgcactgcaaagtttcgcatttgaaatattaaccaaaacaccgaatatttctactgaacaaaaactggctttaattcaaattttagcgcaaggcgctggtgtgcaaggaatgtgtttagggcaaagtttagatcttatttctgagcataaacagattagtttaagtgaattagaattaattcatcgtaacaaaacgggtgcattgctaattgccgcattgaaattaggtttcatttgttctccgcattttaccgacaaaaggttagaacaatccttaacacaatatgcggaagccattggtttagcctttcaagttcaagacgatattttagatattgaaggcgatagtgcagaaattggcaaacaggtgggtgccgatcttgatttagataaaagtacatatccaaaattacttggattaagtggtgcaaaacaaaaagcgcaagatctatatcaaagtgcgttgtctgaattagaaaaaattccttttgatacaaccgttcgtgcattagctgaattcattattaccagaaaaagttaa

SEQ ID NO: 140 - DNA, 258 bp, ARTIFICIAL
  L27 gene sequence
atggcaactaaaaaagctggtggttcaactcgtaacggtcgcgattctgaagctaaacgccttggtgttaaacgtttcggtggcgaatctgtattagcaggtagcattatcgttcgccaacgtggtactaaattccacgcaggtaacaacgtaggaatgggaagagatcacaccttattcgcaaccgcagatggtaaagttaaatttgaagtaaaaggcgagaaaagccgtaaatacgtagttattgttactgaataa

SEQ ID NO: 141 - DNA, 957 bp, ARTIFICIAL
  trxB gene sequence
atgtcagatatcaaacacgcaaaacttttaattttaggctcaggccctgctggttatacagcagccatttatgcggcacgtgcaaacttaaaaccagtattggtgactggtttgcaacaaggtgggcagctgaccactacagatgaaattgagaactggccgggcgattttgagatgactactggttcaggtttaatgcaacgtatgttgcaacatgcagaaaaatttgagacagaaatcgttttcgatcatatcaatcgcgtcgatttatcttctcgcccattcaaactttttggcgatgtgcaaaatttcacttgtgatgcgttaattatcgcaacaggtgcctctgcacgctatattggcttaccttcagaagaaaactacaaaggtcgtggcgtttctgcttgtgcaacctgtgatggtttcttttatcgtaataagcctgttggtgtcattggtggaggaaatacagcggtggaagaagccctttacttagccaatattgcaagtacagtgcatttaatccaccgtcgcgatagcttccgtgcggaaaaaatccttatcgatcgtttatacaaaaaagtggaagaagggaaaatcgttcttcatactgaccgcactttagatgaagtattgggcgataatatgggcgtaactggattacgtttagccaacacaaaaactggggagaaagaagaactcaaattagatggcttattcgtggcgattggtcattcgccaaatacggaaattttccaagggcaactagaattgaataatggctatatcgttgtaaaatctggtcttgacggcaatgcaactgccacttctgtggaaggcgtgttcgcagcaggcgatgtcatggatcacaattatcgccaagccattacctccgcaggaactggttgtatggcagccttggatgcagaacgctatttagatgctcaagaagcataa

SEQ ID NO: 142 - DNA, 567 bp, ARTIFICIAL
  efp gene sequence
atggctacatatactaccagtgatttcaaaccaggtctaaaatttatgcaagacggcgagccttgtgtcatcgttgaaaatgaatttgtaaaaccaggcaaaggtcaggcattcactcgtactcgtattcgtaaattaatttcaggcaaagtattagacgtaaactttaaatctggcacttcggttgaagcagctgatgttatggatcttaacttaacttattcatacaaagacgatgcattctggtactttatgcacccagaaacatttgaacagtactctgcagatgcaaaagccgtaggcgatgcagaaaaatggttattagaccaagcagattgtatcgtgactttatggaatggcgcaccaattactgttacgccaccaaactttgttgaattagaaatcgtcgatacagacccaggtcttaaaggcgataccgcaggcactggcggtaaacctgcaacattaagcacaggcgcagttgtaaaagtgccgcttttcgtccaaatcggcgaagttatcagagttgatacccgctctggcgaatacgtctctcgcgtaaaataa

SEQ ID NO: 143 - DNA, 255 bp, ARTIFICIAL
  IF-1 gene sequence
gtgcggataaaaaatcgattatttttagaggatacaatggcgaaagaagattgcattgagatgcaaggcacaattttagagactttaccgaatactatgttccgcgtggagttggaaaacggtcacgtggttactgcacatatttctggaaaaatgcgtaaaaactatatccgtattttgactggggataaagtgactgtagaaatgacgccttatgatttaagtaaaggacgtattattttccgtagtcgttaa

SEQ ID NO: 144 - DNA, 585 bp, ARTIFICIAL
  pth gene sequence
atgtcagaaataaaacttattgttggtttaggcaaccctggcgataaatatacagatacacgccacaatgcaggcgaatggcttattgaacgcttggctcgtcgttttaacgtttcactaaatccagaaagtaaattcttcggaaaaactgcccgcactttagtgaatggaaaagaagtacgccttttagtgccaacaacttttatgaatttaagcggtaaagcagttggcgcattggcaagtttttaccgtattaaacctgaagaaattttagtgattcatgatgaattagatttaccaccaggcactgcgaaactcaaacaaggcggtggacatggtgggcataacggcttaaaagatattgtggctcaattaggcaataacaataatttctaccgtttacgtattggcattgggcatcctggccatcgtgatttagtggcaggttatgtcttaaataaaccatctccagcagatcgcgatgcacttgaaaaagtgctagatgaagccactgattgtgtagaaatgattttcagagatggaatggtcaaagcgaccaatcgtttaaacagttttaaaatttaa

SEQ ID NO: 145 - DNA, 3075 bp, ARTIFICIAL
  Sequence of the alr coding sequence and flanking regions.
agtatttgcgattgcagaaaaacgtacgacttctagcgaaggcccacaaaatgtgatcaatgtgctagaaagtacgattgaaaaaatcgatattttaagcaaacttgaaaatcattcaggtgtaacaggtgttacgacgggctttaccgatcttgataaaaaaacggctggtttacaaccttctgacttaattatcgttgcggcacgtccgtcaatgggtaaaaccactttcgccatgaacctttgcgaaaatgccgcaatggcaagtgaaaaacccgttttagtatttagtttagaaatgccagcagaacaaattatgatgcgtatgatcgcttcccttgctcgcgttgatcaaactaaaatccgaacaggtcaaaatttagatgaaatcgagtggaacaaaattgccagcgtagtaggaatgttcaagcaaaaaaataatctttttatcgatgattcttcaggtctaacacctaccgatgttcgttcgcgcgcacgccgagtttatcgtgaaaatggtggattaagtatgattatggtggattatttgcaattaatgcgcgcaccagcattttcagataaccgaacactagaaatcgcagaaatttctcgctccctcaaagcactcgccaaagaattacaagtgccagtagtcgccctttctcagttaaatcgtactttagaacaacgtggagacaaacgccctgtaaactcagatttacgtgaatctggctctattgaacaagatgcagacttgattatgtttatttatcgtgatgaagtctataacgataactcggaagataaaggtgttgcagaaattattatcggtaaacagcgtaacggcccaattggtcgagtgcggttaaaatttaatggacaattttcacgcttcgacaatctcgccgaacaacgtgaatatcgagatgattattaaggaaaaataatgaacgtaaaaccggcgacagcgaaaattagttcgcacgccttaaaacagaatttagaaataattaaacaaaaagcaccaaatagcaaaattattgctgtggttaaagcaaacgcctatggtcacggcgttgtattcgttgcttcaaccttagaacaaaatgttgattgctttggcgtggcgcgtttagaagaggctttagcattacgctccaacggcattactaaaccgattttattgcttgaaggttttttcaatgaacaagatttgcctattctagccgttaataatattgaaaccgtggtacacaatcacgaacagcttgatgctttaaaacgtgcgaatttaccaagtccaattaaggtttggttaaaaatagatacgggaatgcatcgcttgggcgttgctcttgatgaagtggattatttttatcaagaactgaaaaaactccctcaaattcaaccgcacttaggctttgtcagccatttcagccgagccgatgaactagaatcagattacacccaacttcaaatcaatcgttttttatccgtcacaaaagataaacaaggtgaacgtactattgcagcgtcaggcggcattcttttctggccaaaatcccacttagaatgtatccgcccaggcattattatgtacggcatttctccaactgatactatcggtaaagagtttggcttaacgccagtgatgaatttaacctcgtcattaattgccgttcgccatcataaacaaggcgatcctgtaggttacggcggtatttggacaagtccacgagataccaaaattggagtggtcgcaatgggttatggcgatggttatccgcgcgatgtgccagaaggtacacctgtttatttaaatggccgtcttgtaccaattgttggacgtgtgtcaatggatatgcttactgttgatttaggcgcagatagccaagatttggtaggcgatgaagtaattttatggggcaaggaattacctattgaaaccgtagctaaattcacaggcattttaagctacgagctaattacaaaattaacacctcgtgttataactgaatacgttgattaatcactgcattttttgaacagagggagtcattctccctaataaaaattccagaaagtgcggttaaaatttcaattatttttaatgaaaggaaataccatgaaaaatattaacccaactcacacccatgcgtggaaatctctcgaagcacataaagctgaattgtcaaacatcaccatccaagatttatttaaacaagaaaaaaatcgttttgacgattattctttaacattcaataaccaaattcttatcgatttttccaaaaacaacatcaatcaaacaaccctttcacatcttcgccaacttgctcaagaatgcgcgcttgatagcgcaaaagaagcaatgtttaccggtgaaaaaatcaatcgtacagaaaatcgtgccgtactacataccgcactacgcaatcgcactaatacgccagtgcttgttgatggcaaagatgttatgcctgaagtcaatgctgtgctagctaaaatgaaagatttctgtcagcgtattatttctggcgaatggaaaggctatacaggtaaagccattacggatgttgtgaatattggtattggtggctctgacttaggcccttatatggtaaccgaagcacttcgcccgtataaaaatcatctaaatatgcactttgtttcaaatgtcgatggtacacatattgcggaaaccttaaaaaaagtcaatccagaaacgactcttttcttagtagcatcgaaaacttttacaactcaagaaaccatgacaaatgctcaaagtgcgcgtgattggttactaaaagcagcgaaagatgaaagtgcagttgcaaaacattttgcagcattatcaaccaatgctaaagatgtagaaaaatttggcattgataccaataatatgtttgaattttgggattgggttggcggtcgttactctttatggtcagctattggtctttcaattgcactatcaattggctttgaaaactttgaagcgttattaaatggtgcgcatgaaatggataaacatttcctctctactccaatcgaacaaaatatcccaaccacttt

SEQ ID NO: 146 - DNA, 20 bp, ARTIFICIAL
  Primer
cgtacgacttctagcgaagg

SEQ ID NO: 147 - DNA, 19 bp, ARTIFICIAL
  Primer
ttcgattggagtagagagg

SEQ ID NO: 148 - DNA, 20 bp, ARTIFICIAL
  Primer
cgccgaacaacgtgaatatc

SEQ ID NO: 149 - DNA, 20 bp, ARTIFICIAL
  Primer
ggtatctcgtggacttgtcc

SEQ ID NO: 150 - DNA, 3000 bp, ARTIFICIAL
  Sequence of the amiB coding sequence and flanking regions.
accagtagaacaattacatgctgcgcttaaagcgataagtcagttatcaaacactcatttggtaacaacgagctctttttataaaagcaaaccgctcggcccacaagatcaacccgattatgtgaatgccgttgcaaaaattgaaaccgaacttagtccgctcaagctattagatgaattacagcgtattgaaaacgagcaaggtcgagtgcgtttacgtcgctggggcgaacgcacgttagatttagatattttgctctacggcaatgaaattattcaaaacgaacgcttaacaattccccattatgatatgcataaccgtgagtttgtcattgtgccgttgtttgaaatcgcatcggatttagttttaccaaatagtcaaatcataacagagctggtcaagcaatttgctgaccacaaaatgataaaattaaatccctagaaatttcaccgcacttttatgaacctcaaaagtgcggtagaatcagcccacatttttcttcattcatgacccgttatggaaagtttgactcaatatatccctgatgaattttctatgctccgcttcggcaaaaaatttgccgaaattcttttaaaattgcatacagaaaaagcaattatggtttatcttaacggtgatcttggggcaggaaaaacaacgctaacgcgcggaatgttgcaaggtatcggtcatcaaggtaatgtaaaaagcccaacttatacgctggttgaagaatacaatattgcaggcaaaatgatttatcattttgatttatatcgtttagcagatcctgaagagctcgaatttatgggcattagagattattttaatacggatagcatctgcttaattgaatggtctgaaaaaggtcaaggcatattgccagaagcggatattttagtgaatattgattattacgatgatgcacgaaatattgaattaatcgcacaaacaaatttgggtaaaaatattataagcgcattttctaattaacttatttatgaaaactaaaattttatttttcctttttttctcaacgtttagtttctctatttttgcagcacctattacgattgcgattgacccaggtcatgggggaaaagatcctggtgcaatcagccgaaacttaggcatttatgaaaaaaatgttaccctttcaattgcaaaagaattaaaagccttattagataaagatccacattttcgcggtgtattaacgcgtaaaagtgattattatatttccgtgccagaacgttcagaaatcgcacgtaaatttaaagcgaattatcttatttccattcatgccgattcatctaaatcacctgatcgtcgcggggcttctgtttgggtattgtcaaaccgtcgagccaatgatgaaatgggtcaatggttagaagacgatgaaaaacgctcggaattacttggtggagcgggaaaggtgctttcacacaataatgacaaatatcttgaccagactgtacttgatctgcaattcggacatagccaacgtacaggctatgtgttaggcgaacatattttgcaccattttgctaaagtaacaacattaagtcgcagtacgccacaacatgcaagtctgggtgttctacgttcgccagatattccttctgtgttggtagaaactggatttctttccaattcagaagaagaaaaaaaacttaattcccaaacttatcgtcgccgcattgcttatatgatttatgaaggcttagttgcattccatagcggtaaaaccaacactttagttaaagacaatttagtgcaaaacatcaaacaaaacgatataaaaaaatcagggaaaaataaccgcacttcagaacaaaatataaatgaagataatattaaagacagtggcattcgccatattgtaaaaaaaggagaaagtttaggtagcttatcaaataaatatcacgtaaaagtctctgatattattaaattaaatcaattaaagagaaaaacactttggctaaatgaaagtattaaaatccctgataatgtcgagataaaaaataaatcattaacaattaaagaaaatgattttcataaaaaacaaaatagcttagtaaataataccaataaagatttaaaaaaagagaaaaatacacaaactaataatcaaaaaaatataattccgctctatcataaagtaacaaaaaaccaaacactttatgctatttcgagggaatataacattccagtaaatatactattgagcctaaatccacatttaaaaaatggcaaagttattacaggacaaaaaataaaattaagagaaaaataaatgcctattaaaattctttccccacaacttgctaaccaaattgctgctggagaagtggtagaacgccctgcatcagtggtaaaagaattagtggaaaatagccttgatgcaggtgcaaataaaatccaaattgatatcgaaaatggtggggcaaatttaatccgcattcgtgacaatggctgtggtattccaaaagaagaattaagcctcgctttggcacgacatgccacgagtaaaatagccgatcttgatgatctcgaagcgattttaagtttaggttttcgtggcgaggcattagctagtatcagttccgtatcacgcctaacccttacttctcgtaccgaagaacaaactgaagcgtggcaagtttatgcgcaaggtcgtgatatggaaaccacaatcaaacccgcatcacatcctgtcggcacaacagttgaagtcgccaatctttttttcaacacaccagcccgccgaaaatttttgcgcacagataaaacagaattttcccatattgatgaagtcattcgtcgtattgctttaacgaaattcaacacagcatttacattaacgcataatggaaaaattatccgtcaataccgtcctgccgaagcaatcaatcaacaactaaaacgtgtcgccgctatttgtggggatgattttgtcaaaaatgccttacgaattgagtggaaacacgatgatt

SEQ ID NO: 151 - DNA, 20 bp, ARTIFICIAL
  Primer
ccgaacttagtccgctcaag

SEQ ID NO: 152 - DNA, 20 bp, ARTIFICIAL
  Primer
tgattgattgcttcggcagg

SEQ ID NO: 153 - DNA, 20 bp, ARTIFICIAL
  Primer
tgcagcacctattacgattg

SEQ ID NO: 154 - DNA, 20 bp, ARTIFICIAL
  Primer
agcaatgcggcgacgataag

SEQ ID NO: 155 - DNA, 2850 bp, ARTIFICIAL
  Sequence of the dacA coding sequence and flanking regions.
ttacctttatttagttatggtggtacctcttatgttgcgattatggcaagttttggtttactgatgtctattcatacgcataaaagtcaatttatgaaaaggagctaatttcattttttctttcttaaagaaagaataaatgaaaagcgttaatattttatgaaattaaaaactgggttaaatttgaccgcacttttgctatttatgataagcgtagcttttcctgcacaggctgatacgcaaaaaatgtatggtattcgaggggataatctttctatcgcaactcaaatgcctgcaccaaggacttattcagtaaaagggcaaacttataccactaaaagtgggaatgaagccaaatcttatattaaagaaggtttagcaagttattatcatcttaaatttgatgggcgcaaaacagcaagtggcgatgtttataactcaaaacaatttactgcagcacataaaacattgccaataaattcttatgctttagtgacaaatttacataacaatcgtaaagttatcgtacgtattaatgatcgtgggccttttagtgataaacgtttaattgatctttcacacgctgcggcaaaagaaattggcttaatttcccgcggcatagggcaggtaagaattgaggcgttgcacgttgctaaaaatgggaatttatcaggcgcagccacaaaaacactggctaaacaagcaaaaactcaggaagctgccgatcgtttagtattaaaatctaacacactttttgataacacatctaagtcaataaatgctctaaaaggaaccgaattttactgtttgaaaatgcttgaattaacctctcgtagccaagcaaataaattaattacgcaacttgcgttagcgaatattcagactgaagtaaatcgctcaggaaataaatatgaaatttatattgggccttttgatgacaaaacaaaaatggcacaagtgagaactaaattacaaaaaatggcaaataataagccattaattgtttatacgtataaaaattaattgtaggaacacactatgttgaaaagaacaacaaaaatcgcatttttatcaagttttgtggcacttagtgctttttcggtatctgcagaggatatgcagtttggcgtaactccaccacaaattacggctcaaacgtatgtattgatggattataattcaggtgcaattttgaccgcacttaatccagatcaacgtcaatatccagcatcactgactaaaatgatgacaagttatgtagttggtgtcgcattaaaacaaggcaaaatccataataccgatatggttaccattggtgaaagtgcgtgggggcgtaatttccctgattcatcaaaaatgtttttagatttaaatacacaagtatctgtagcagacttaaatcgaggtgtgattgttgtttctggtaatgatgcgactgttgcattagctgaacatatttctggcaatgtaccgaactttgtagaaacaatgaataaatatgttcaacaatttggtttgaaaaatacaaatttcaccacgccccatggtttagacgatccaaatcaatattcttccgcgcgtgatatggcaattattggtgcgcatattattcgtgatttacctgaagaatataaaatttactccgaaaaaaactttacatttaataaaatcaaacaagctaaccgtaatggactattatgggataaaactatcaatgttgatggaatgaagacagggcatactagccaagcaggatataacttagtcgcttcagcgactacatcaaacaatatgcgtttaatttctgtagtaatgggtgtgccaacttacaaaggtcgtgaagtagaaagtaagaaacttttacaatggggttttgctaatttcgaaacatttaaaactttagaggctggtaaagaaatttcagaacaaagggtttattatggcgataaaaattcagtaaaacttggtgctttaatggatcactttattacgatccctaaaggtaaacaaagtgaggttaaagctcgttatgaattagcagataaaaatttacaagcaccattagtaaaaggtcaagtgattggtaaagtggtttatcaactggatggtaaggatattgcaagtgccaatttacaagtgatgaatgatgtgggagaagcgggtatttttggtaaactatgggattggttagtattgactgtgaaagggttattctcataaaaagaatttgaaaattgaccgcactttttgatttattttatttttaggaaagaaaatgacaatagaaaacgattatgcaaaactcaaggaattaatggaatttccagcaaaaatgacttttaaagttgcgggaattaatcgagaagggttagcacaagatcttatacaagtggtgcaaaaatatattaaaggcgattatattccaaaagaaaagcgcagtagtaaaggcacttataattcagtttcaattgatattattgctgaaaactttgatcaggtagaaacactctataaagaactggctaaagttgaaggcgtgaaaatggttatttagtatgaacaattcccttatcgttcgtcagttaggattgcaagattatcaagaaatttggcacaaaatgcaggattttactgatactcgaaatgctgaaacgcaagacgaaatttggttagtacaacattatcctgtttttacacaagggcaagcaggtaaaccagagcatcttttacaacgtagtgaaatccctgtggtgcaatcggttcgtggtgggcaaattacctatcacgcacccggtcagcaagtgatgtatgtgcttattgacattaaacgccataaaaatttaaatgtac

SEQ ID NO: 156 - DNA, 20 bp, ARTIFICIAL
  Primer
tttcctgcacaggctgatac

SEQ ID NO: 157 - DNA, 21 bp, ARTIFICIAL
  Primer
cccaccacgaaccgattgcac

SEQ ID NO: 158 - DNA, 20 bp, ARTIFICIAL
  Primer
tgtaggaacacactatgttg

SEQ ID NO: 159 - DNA, 20 bp, ARTIFICIAL
  Primer
tatcctgcttggctagtatg

SEQ ID NO: 160 - DNA, 3397 bp, ARTIFICIAL
  Sequence of the dacB coding sequence and flanking regions.
atccttatgacaaccttatcaaccaaacaaaaacaatttttaaaaggtcttgcgcaccatcttaacccagtcgttatgcttggtggaaatggcttaaccgaaggtgtacttgctgaaattgaaaatgcacttaatcatcacgaactcattaaagtaaaagttgctggtgcagatcgtgaaacaaaacaacttattatcaatgcgattgtgcgtgaaactaaagcagcacaagtacaaactatcgggcatattttggtactttatcgcccaagcgaagaagcaaaattcagcttccacgcaaataacaacaaaagtgcggtcatttttaaccgcacttttttatttaaatataattcacttcaataatatcaaattcaacgacaccaccaggcgttgtaatattaacggtatcatctaattctttaccaattaagcctcgcgcaattggtgaattaaccgaaattaaaccagatttaatatcagcctcatcatcgcctacaatgcgataagtgacttcttcgtctgtatttgtatttacaagcacaactgttgcaccaaaaatcactttaccattatttggcatttttgagacatcaataatttgagcattaccaagtttaccttcaatctcttgaatacgaccttcacaaaaaccttgttgctcacgcgctgcgtgatattctgcattttcttttaaatctccgtgctcgcgggcttctgctatggctttaataatttctggacgacgtacattttttaagaaatccaattcttctcgtaattgttctgcgccacgcacagtcattggaatttgttgcattgtttttccttttactaaataaaacaaaaaccacagtaaaattctaaaatcttactgcagtattatcaaaaataaacttgaaatgagaaaataatttactcaatttcattcggggcttattattgttcgtctaaaaaaaaatagcaaccataacaaacctaatatgaaaaaattatcttcaatttccaccgcacttggttcctttttactttcagtgagttttagccttccaaccttcgccaatattaatgtttcagatttaacacaaaaactgcctgaaggctctaacgtaggtttcatcgccaaaaatataaatcaaaaccaaattattgctgattataatggctcaacctttatgctttctgcaagcacacaaaaagtttttacagccgttgccgctaaacttgcattagacgatcaattccaatttgagaccgcacttttgagtaatgggaaaattcaaaatgggaatttagatggcaacttaatcgtgcgtttcacaggcgatcctgatctcacaagaggtcagctttatagcttacttgccgaattaaaaaaacaaggcatcaaaaaaattaatggcgatttagtattagatacctctgttttttctagtcacgaccgaggattaggttggatttggaacgatctcacaatgtgtttcaactctccaccagcagctgcaaatattgataacaactgtttttatgcggaactagatgcgaataaaaatccaggtgaaatagtaaaaattaatgtgcctgcacaatttcctattcaagtgttcggacaagtttatgtagcggatagcaatgaagcgccttattgtcagctcgatgttgttgtacacgacaataatcgctatcaagtaaaaggatgtttagcccgtcaatataaaccttttggcttaagttttgccgtgcaaaatacggatgcttatgctgctgagattattcaacgtcaattaagacaattaggtattgagttcaatggcaaagtcttgttaccccaaaaaccacaacaaggtcagctattagcgaaacatttatcaaaaccattaccagatttattgaaaaaaatgatgaaaaaatccgataaccaaattgccgattcattattccgagcggtggcattcaattactataaacgccccgcctcctttcaattaggcacattagcggttaaatccatattgcaaaaacaaggaattcgttttggtaatagcattttagccgatggttcgggtctatctcgccataatcttgtggcacctaaaacgatgctatccgttttagaatacatcgccaaaaacgaagataaactacatttaatggaaactttccccatcgcaggtgtagatggcacgatcagtgggcgaggtggattaattagcccgccattagtgaaaaacgtgattgctaaaactggttctttgaaaggcgtttataacctagctggctttatgacaaatgcgcgaggggaaaaagtggcatttgtacaatttattaatggctactcaactggcgatttagaaagcaaaacaaaacgtgccccattagtacaattcgagcgtaatttatataacgaactctataaatattaaggtgctgtagtagataacaactaaaaatcccatttaggttagaataaaccaatgagaaaaagtcgcttaagtcagcataaacaaaataaactcattgaactgtttgtcgcaggtgtcacagcaagaacagccagtaaattggttaatgtaaacaaaaatacagccactattactttcatcgattacgcttactcatttatcaaacaagcccacatttggaaatgtttgaaggcaaaattgaagccgatgaaagctatttcggcagtactcgaaaaggcaaacgtggtcgcagtgttgcagggaaagtcgcagtattcgggcttctcaaatgaaatgcaaggtttataccgtcgttgttcctaatgtgcaatcagcaacattattgccaattatccgagagaaagttaagcctgatagcattgtgtacacggatacctttcgtagttatgatgtgcttgatgtcagtgaatttagccattttcgcatcaatcacagcacgcattttgctgaaaatcacaactacataaacggaattgggaatttttggaatcacgcaaaacgccatttacagaagtttaatggcattcccaaagagcattttgagctgtatttaaaagaatgtgaatggcgttttaacaatagcgaaataaaatctcaaatttccattttaaaacaattagttaaggggagtttggtctagttatctagtacagccccataaaaaagccctcaatattcgagggcttgattttttactatcgtaataaaaaattagcgacgtaaacctaaacgagcgatagtgctttggtataaagcaagatcagtacgttttaagtagtctaaaagtttacgacgacgagaaaccatacgtaataaaccacgacgaccatggtggtcttttttgtgctctgcaaagtgagtttgtaagtggttgatttgtgcagttaataatgcgatttgaacttcagaagaac

SEQ ID NO: 161 - DNA, 20 bp, ARTIFICIAL
  Primer
tcttgcgcaccatcttaacc

SEQ ID NO: 162 - DNA, 20 bp, ARTIFICIAL
  Primer
ggtttctcgtcgtgctaaac

SEQ ID NO: 163 - DNA, 20 bp, ARTIFICIAL
  Primer
atcttcaatttccaccgcac

SEQ ID NO: 164 - DNA, 20 bp, ARTIFICIAL
  Primer
gtaattgaatgccaccgctc

SEQ ID NO: 165 - DNA, 2925 bp, ARTIFICIAL
  Sequence of the ddlB coding sequence and flanking regions.
tcgttatttaattgccgaagccgatgaaagtgatgcgtcgtttttgcatttacagccaatggtatctgttgtaactaatatggagccagaccatatggatacttacgaaggcgattttgaaaaaatgaaagccacttatgtgaaattcctgcataatttacccttctatggtttagccgtgatgtgcgctgatgatcctgttttaatggaacttgtgccaaaagttggtcgccaagtgattacatatggttttagtgaacaggcagattatcgcattgaagattatgaacaaacaggttttcaaggtcattacacggtgatttgcccaaataatgaacgtattaatgtgttgctcaatgttcctggaaaacataatgcattaaatgcaacggctgcacttgctgtagcaaaagaagagggtattgctaacgaggcaattttagaagctctggctgattttcagggggctggtcgtcgttttgatcagctaggcgaatttattcgtccaaatggtaaagtgcgtttagttgatgattatggtcatcatccaacagaagtaggcgtaaccattaaagcggcgcgagaaggctggggagataaacgtattgtaatgattttccaaccgcatcgttattctcgcactcgtgatttgtttgatgattttgtacaagtgctttcgcaagtagacgctttgattatgcttgatgtgtacgcagcgggagaagcccctattgttggcgctgacagtaaatctctttgccgttccattcgtaatcttggtaaagttgatcctattttggtatcagatacttcgcaactaggcgatgttctcgatcaaattattcaagatggcgatttgattttggcacaaggtgctggtagcgtaagtaaaatttctcgtggcttggctgaatcttggaagaattaatgccagatggattgattgaaaatcttagtattagaaaagtatcatcagtaagaagaaaaacaggatagaaaatgaacttaaaacaagaaaaaatcgcggtgttattaggcggcacatctgctgaacgtgaagtttctctcaattcaggcaaagcggtattagaagcattattaaagcaaggttataatgcacatcctattgatcctaaagaatataatgttgcaaatcttaaaaaggatggctttaatcgagcatttaatattttgcacggtcgtggtggagaagatggcacaatgcaaggtttattagagcaaattggtttgccttatacgggttgtggcgtgatggcttctgcattaacgatggacaaaatgcgtacaaaaatgttgtggaaagcttttggtttacctgttgcagatatgaaagtggttacccgagaaactttttctgaattggatcctcaggctgttgtggcaaaattaggcttaccattaatggttaaaccctctttagaaggctctagcgttggcttaacgaaagtaaaagcggtagaagagttaaaaagtgcggtggaatatgcgcttaaatttgataataccattctaattgaagagtggttagctggcgatgaattaactgtgcctgtgcttgacaatcaagtattacccgcaattcgtattgttccagagggcgaattttatgattatgaagcgaagtatatttctgataatacgcaatatttctgcccagcaggtttaacgcctgaacgcgagcaagcgttatcaacattagtaaaacgtgcttatgatgcagtgggatgtcgtggttggagtcgtattgatgtaatgtgtgatgcaaaaggtaatttccgtttggttgaggttaatactaatcctggaatgacgagccatagtttattcccaaaatctgcagcgacagtaggtatttcttttgagcaactcgtcgtgaaaattttggagctgagcctgtaatgaacattctgaaaagaaaaacgccacagaatattcgttttggagaacaaaagcctaaatattattttcatattcgggcttttgcggtattgcttggtgtcttttttttacttggtgtttattttaattggcaaagcattttagaaaaaatggatgataagccgattagcgcatttgcacttgttggacaaaatacctttactactgctgatgatattaaagaaagcctattaaaaatgggcgaattaaaaggattttgggggcaagatgtggcaccgattcaagagcaaattgaggctttaccttgggttaaaggtgcaatagtaagaaaaatgtggccaaatcgtttaagtatttgggtatcagaatatcaacccgttgcgttttggaatcaaaatcaatttgttacccttgatggtatcgtttttcagcttccctctgtacgtttaactgcaaaaaatttgccctatttgggtgggcccgattatcagagtttgaaagtaattgagacgtggaaccaaatttatattaatttaaaatcaaataatataatggcaaagggaattaatattgatgatcgcggtgcgtggcaggtccagcttgataatgatattgtgctaaaattaggtcgtggcgattggaaatcaaaacttgagcgatttgtcacaatttatccgcaaattgatgtgccagaaaacaaaaaaatagattatatagatttaagatatacggcaggtgcagctgtaggtatggttgatagataaaaataactgggtgcgaaaatggttaaaggtgtggaaacaaaaacaatagtaggtttagaggttggcacgtcaaaagtggtcgttgtagttggcgaagtatttcctgatggtgtagtgaatgtgcttggtgtaggcagttgtccttcaaaagggattgatcgtggcagcatcactgatcttgatgccgtggtgggttcgattcaacgtgctattgaagcggcagaatctatggctgattgtc

SEQ ID NO: 166 - DNA, 20 bp, ARTIFICIAL
  Primer
gttatttaattgccgaagcc

SEQ ID NO: 167 - DNA, 20 bp, ARTIFICIAL
  Primer
ccacggcatgaagatcagtg

SEQ ID NO: 168 - DNA, 20 bp, ARTIFICIAL
  Primer
gttattaggcggcacatctg

SEQ ID NO: 169 - DNA, 20 bp, ARTIFICIAL
  Primer
aatacgactccaaccacgac

SEQ ID NO: 170 - DNA, 3075 bp, ARTIFICIAL
  Sequence of the ftsI coding sequence and flanking regions.
cggtattttgcttgatcttggtgtgtcttcccctcagcttgatgaagcagaacgtggttttagttttatgaaagatggcccgcttgatatgcgtatggatacaactcaaggtttatctgctgaagaatggttaaaacaagtgtccattgaggatttaacttgggtgttgaaaacttttggcgaagagcgtttcgctaaacgtattgccactgctattgttgatttcaataaaagtgcggtaaaaaatggcacagaatttttatcgcgtaccagtcaattggcggaacttatttcacaggcagttccttttaaagataaacataaacatcctgcgacgcgtagtttccaagctattcgtatttttattaattcggaattagatgaattagaaagtctgcttaattctgcgttagatatgttagcaccagaaggtcgtttatcaattattagtttccattctttagaagatagaatggtgaaacattttatgaaaaaacaaagtaagggcgaggatattcccaaaggtttaccattgcgagaagatcaaattcagcgtaatcaaaaattaagaattattggtaaagccattcagccaagtgatgcagaaattcaagccaatcctcgttcaagaagtgccatattacgtgtggcagagagaatttagcgatgtctgaaaataataagcctcgttatccgttacagcagattttagtcgaagatttattttcttcaaataagttagtggtgttgctgttaatagggattttagtttctgcaatggggacgatttggataacccataaaactcgccaattaatttctgaaaatggaatgttaattttacagcgtcaagcacttgagaatgaataccgtaatttacaagtgcaggaagctacggaaggggatagcacgcgagtagaatctattgcgattagtacattaaaaatgaaagttgtttcttcagagcaagaagttgaaattagagaataataggtaaaaaaaatggtgaaatttaattcctcgcgtaaatcaggtaagtcaaaaaaaacaattagaaaattgaccgcacctgaaactgtaaagcaaaacaagcctcaaaaggtgtttgaaaaatgctttatgcgtggacgttatatgctttctacggttcttattttacttggcctgtgtgctttagtcgcacgagcagcttatgttcaatctattaatgccgatacgttatcgaatgaagcggataagcgttctttgcgtaaagatgaagtattatcggtgcgtggttctattttagatcgtaatggtcagcttttatctgtaagcgtgccgatgagcgcgattgtggcagatccaaaaacgatgttgaaggaaaattcgcttgcggataaagaacgaattgcagctttagccgaagaattaggtatgactgaaaatgatttagtgaaaaaaattgagaaaaattctaaatctggttatttgtatttagcacgtcaagttgaattaagtaaagctaactatattcgtagattaaaaattaagggtattattttagaaacagagcatcgccgtttttatcctcgtgtagaagaagctgcacacgtggtgggttatacggatattgatggaaatggtattgaaggcattgagaaaagttttaattccctgcttgttggtaaagacggttcacgtactgttcgtaaagataaacgtgggaatattgttgcacatatctccgatgagaaaaaatatgatgcacaagatgttaccttaagtatcgatgaaaaattgcaatctatggtgtatcgtgagattaaaaaggcggtgtctgagaataatgctgagtctggtactgcggtgttagttgatgttcgaacaggggaagtgttagctatggcgactgcgccctcttataatccaaacaaccgtgtcggcgtgaaatcagagttaatgcgtaaccgtgcaattaccgatacttttgagccaggttctacggtaaaacctttcgttgttttaaccgcacttcaacgaggtgtagttaaacgagatgaaattattgatactacgtcctttaaattaagcggtaaagaaattgtggacgttgcaccacgtgctcagcaaactttagacgagattttaatgaactctagtaaccgtggtgtaagtcgtcttgcattacgtatgccacctagtgcattaatggaaacttatcaaaatgcaggtttaagtaaaccgacagatttaggcttgatcggagagcaagttgggattttgaatgcaaatcgtaaacgctgggcagatattgagcgtgcaacagtcgcttatggttatggtattactgcgacacctttacaaattgctcgtgcctatgcaacccttggtagtttcggtgtttatcgtccgctttctatcactaaagttgatccgccagttattgggaaacgggttttctctgaaaaaataactaaagatattgtgggaattttagagaaagtagcaattaaaaataaacgcgcaatggtggaaggctaccgtgtcggcgtaaaaacaggtacggcacgtaagattgaaaatggacattatgtaaataagtatgtggcatttactgcgggtattgcaccaattagtgatcctcgttatgcattagtggttttgatcaatgatccaaaagcaggagaatattatggtggtgcggtttctgcccctgtattctctaacattatgggctatgcgttacgtgcaaatgctattccgcaagatgctgaagcagctgaaaacacaacaacgaaaagtgcaaaacgtattgtttatattggcgaacacaagaatcaaaaagtgaattaaggaaaaattatgaaaaaactcaccgcactttttaatttgcctgaattaaagaatgatatagaactccataatatggtgttagatagccgtaaggttaaagctggcgatctttttgtggcgataaaaggtcatcaggtggatggaaatcaatttattgattctgctcttcattctggtgcgagtgcggtggtttctgagacagaattatccagcgagcatttaactgtagcgtttatcggg

SEQ ID NO: 171 - DNA, 20 bp, ARTIFICIAL
  Primer
cttgatgaagcagaacgtgg

SEQ ID NO: 172 - DNA, 20 bp, ARTIFICIAL
  Primer
ccttacggctatctaacacc

SEQ ID NO: 173 - DNA, 20 bp, ARTIFICIAL
  Primer
taattcctcgcgtaaatcag

SEQ ID NO: 174 - DNA, 20 bp, ARTIFICIAL
  Primer
tcaactaacaccgcagtacc

SEQ ID NO: 175 - DNA, 2925 bp, ARTIFICIAL
  Sequence of the glmS coding sequence and flanking regions.
atgattatgatagttttggtgttgtgccagcgttagatgcctgtcaggctttagctgaaattttacacgccattattgcgggcgaaaccttagaaaaagcggtggaaataagcttaatttcgttgggaacaataagggtattattggaaacagaaactggacgagattggtcagaaagtaagctaaaagaaaatgaagatattcaaacagaacttgatgtgcaatggcaagtttatcgtttgcttaaagaatgtgaaaaacgtgatattgaattaattttagctttaaaaaatgaaattcggactgagggtatatctaacattggtatagaatttcatcaataacgtgagatttgtcacaatttttagaaatcctgcttttaattcatctcaagttagattatcctttgcacagtttttgcgacaaattcgcaaagatacttttaaagaatcaaactttttatttaacagaaggtacaaatttatgaacaaaacagatttaattgatgcaattgcaaacgctgcagagttaaacaaaaaacaagctaaagcagcgttagaagcgactttagatgcaattactgcaagcctaaaagaaggtgagcctgtacaattaatcggtttcggtacatttaaagtaaatgaacgtgctgctcgtactggtcgtaacccacaaactggtgctgaaatccaaatcgcagcatctaaagtgccagcatttgtatctggtaaagcattaaaagatgcaatcaaataattgataacatcaatgaaatgaagccctgtcgattgcgcaggggttttttattgtgtaaacgcgtggcaaatgtaaaaacaaacttagtaatagaataaataaggaaaacttatgtgtggtattgtcggcgcagtagcacaacgagatgtagcggaaatcttaattaatggtttacatcgtttagaatatcgtggttatgattcagctggtgttgcagtaatcaataaacaaaatgaattacaacgtattcgttgtttaggcaaagttaaagctttagatgaagccgtatcagaaaaaccattaattggtggaacgggaattgcacatacccgctgggcaactcacggcgaaccatcagaaactaatgcgcatccgcattcatcaggtacttttgctgtagtacataacggtattattgaaaatcacgaagaacttcgcgaattattaaaatctcgtggttatgtctttttatcacaaaccgatactgaagtgatcgcgcatttagttgaatgggaaatgcgtacgacggattcacttttagacgctgtgaaaaaagcagtaaaacaactcactggtgcatacggtatggtggtaatggacagccgtcatcctgaacatttagtggcagctcgttctggtagtccacttgtgattggcttaggtatcggtgaaaatttcttagcttcagatcaacttgcgcttttaagtgttacccgccgttttatctttttagaagaaggagatattgcagaaattacacgtcgtacagttgatatttatgatactcacggtaataaggctaaacgtgaaattcacgagtctaatcttgaaaatgacgcggcagagaaaggcaaattccgtcattttatgcagaaagaaatttacgaacagccaaccgcacttattaatacaatggaagggcgtatcaatcacgaaaatgtgattgttgattcaatcggtaatggtgcaaaaggcattttagaaaaagttgagcatattcaaattgttgcttgtggtacatcttataatgcaggtatggtggcgcgttattggtttgaatctttagctggagtgagctgtgatgttgaaattgcatcagaatttcgttatcgcaaatttgttacccgtccaaatagcttattgattaccctttctcaatctggcgaaacagccgatactttagctgcacttcgtttagcgaaagaaaagggctatatggcggcattaacaatttgtaatgttgctggctcttcgctcgtacgcgaatcagatcttgcatttatgacgcgtgccggtgttgaagttggggtagcatcaacaaaagcatttacgacacagctcgctgcgttattaatgttggtgacggcacttggtaaagttaaaggtcatatttctgtagaaaaagaacgtgaaattattaaagcaatgcaatctttacctgctgaaattgaaaaagcgttagcttttgatacagaaattgaagctttagcagaggattttgctgaaaaacatcatgcacttttcttaggtcgtggtgcgttttatccaattgccgtagaggcctctttgaaattgaaagagatttcttatattcacgctgaggcctatgcggcgggagaattgaaacacgggccattagcgttaattgatgctgatatgccagtgattgtcgttgcaccaaataatgaattattagaaaaagtaaaatcgaacattgaggaagtgcgagctcgtggcggtcaattatacgtatttgccgataaagaagcaggatttacgccaagtgaaggaatgaaaatcatcacgatgccaaaagtcaatgatattgttgcaccgattttttataccattccaatgcaattactttcttattatgtggctttaattaaaggtactgatgtagatcaacctcgtaacttagcaaaatcagttaccgttgaataaagtgcggttgattttaatgtaataaaaaatacggtgaaatttcaccgtattttttagttaaataatcttctttgtttccgtgttttaatcacttgtgcgattaacaataatgtgagaataaccacatatagtgaaaaaataaccactagccattgcaccatcgttaaaccaaataatgaccattggctttcattacaagagccagttgggttaaatataaatgga

SEQ ID NO: 176 - DNA, 20 bp, ARTIFICIAL
  Primer
ttgtgccagcgttagatgcc

SEQ ID NO: 177 - DNA, 20 bp, ARTIFICIAL
  Primer
aacgatggtgcaatggctag

SEQ ID NO: 178 - DNA, 20 bp, ARTIFICIAL
  Primer
tgtcggcgcagtagcacaac

SEQ ID NO: 179 - DNA, 20 bp, ARTIFICIAL
  Primer
ataagtgcggttggctgttc

SEQ ID NO: 180 - DNA, 2850 bp, ARTIFICIAL
  Sequence of the glmU coding sequence and flanking regions.
atctaacaaatttctggttggtgcttgacctattcaagccccatccaagaccgtaggggagtaatcttaattatcctacgtagatggtgaacagaataagaatttttcttgcttctgggcgccgaagtcatcctagtcttaggattaggtaaattaattccgagtaatcggagtgtattcaggagctaaaagccaatggcattaaatcttcaagacaaacaagcaattgttgctgaagtaaatgaagcagccaaaggtgcactttcagcagtaatcgcggattctcgcggtgtaactgttgagaaaatgactgaattacgtaaatcagcacgtgaagctggtgttacaatgcgtgtagttcgtaatactttattacgtcgcgcagttgaaggcacagattacgaatgcttaaaagatacgtttgtaggtccaacacttatcgcgttctctaacgaacacccgggcgcacgtgctcgtttgttcaaagagtttgctaaagcaaacgataagtttgaaattaaaggtgcagcctttgaaggtaaaatccaagatgttgaattcttggcaacattaccaacttacgaagaagcgattgcacgtttaatgggcacaatgaaagaagctgcagcaggcaaacttgctcgcaccttcgcggcattacgcgacaaattacaagaagcagcttaattattaagcgtttcttacttcatctaactttatttattttaggaattgattgttatgtcattaactaacgaacaaatcattgaagcgattgcttcaaaaactgtaactgaaatcgttgaattaatcgcagcgatggaagaaaaattcggtgtttcagcagcggcagcagtagcagcagctccagcagcaggcggtgcagcggcagcagaagaaaaaactgaattcgacgttgtacttaaatctgcaggtgcgaacaaagtagcagtaattaaagcagtacgtggtgcaactggtttaggcttaaaagaagctaaagatttagttgaatctgctccagctaacttaaaagaaggcgtttctaaagaagaagctgaagcacttaagaaagaattagaagaagcgggtgcagaagtagaagttaaataatttctattttaaccactttaaaattcaaaaaaccgatgggaaaccatcggttttttcttatataaaagtttgttatagtttttacttaaaaacttaccatttgctatctttctaagatagaatattacccgttgttattgatgaataaagagaaaatttatgacaaaaaaagcattaagtgcggtaattttagcagctggaaaaggaacgcgtatgtattctgatttacccaaagttctacatacaatcgcgggtaaaccaatggtaaaacacgtgattgatactgcccatcaattaggctcagaaaatattcatttaatctatggtcacggtggggacttaatgcgtacccatcttgcgaatgaacaagtaaattgggtattacaaacagaacaacttggcacagcacatgcagttcaacaagcagcacctttctttaaagataacgaaaacattgttgtgctttacggcgatgcaccattaattactaaagaaacattagaaaaattaattgaagcgaaaccagaaaatggcattgcattgcttaccgtaaatttagataacccaacaggctatggacgaattatccgtgaaaatgggaacgttgtagccattgtagaacaaaaagatgcgaatgctgagcaactaaatattaaagaagtcaatactggcgttatggtatctgatggtgcaagtttcaaaaaatggctagctcgtgtaggcaataataatgctcaaggcgaatattacttaacggatcttattgctctcgcaaaccaagataattgtcaagttgttgctgtacaagcaacagatgtcatggaagttgaaggcgcaaataatcgcttacaattagccgcacttgaacgttatttccaaaataaacaagcctccaaattattacttgaaggcgtaatgatctacgatcccgctcgttttgacctacgtggaacattagagcatggaaaagatgtggaaatcgatgttaatgttattatcgaaggtaatgttaaactcggtgatcgcgtaaaaattggcacaggttgcgtattgaaaaatgttgttattggcaatgatgtagaaataaaaccctattcagtgctagaggattctatagtaggagaaaaagccgcaattggcccattttctcgtttacgcccaggtgcagaacttgcagctgaaacgcatgtcggtaactttgtagaaattaaaaaatctaccgttggtaaaggttctaaagtaaatcacctgacctatgttggcgattcagaaattggctcaaattgtaatattggagcgggtgtcataacctgcaactacgatggtgcaaataaatttaaaacgatcatcggtgatgatgtgtttgtgggatctgatacacaattagtcgcgccagtgaaagtcgcaaatggcgcaactattggtgctgggactacaattacacgtgatgttggcgaaaatgaattagtgattacaagagttgctcaacgacatattcaaggttggcaacgaccaataaagaaaaaataaaatagaataaaaaatcctacgtattatcgtaggtttttttataaaccaattttacaaatcgtaattaaaatcacataaaaaatgaccgcacttaatgttaataatttatttgctagtttaggtttatgttgatgaagacggtatagcattctagctgtaacagctagaataaagggataaacccaaaaaagcgttgaaaataaattg

SEQ ID NO: 181 - DNA, 21 bp, ARTIFICIAL
  Primer
cgaagtcatcctagtcttagg

SEQ ID NO: 182 - DNA, 20 bp, ARTIFICIAL
  Primer
gctataccgtcttcatcaac

SEQ ID NO: 183 - DNA, 20 bp, ARTIFICIAL
  Primer
gcggtaattttagcagctgg

SEQ ID NO: 184 - DNA, 20 bp, ARTIFICIAL
  Primer
gctctaatgttccacgtagg

SEQ ID NO: 185 - DNA, 2925 bp, ARTIFICIAL
  Sequence of the glnA coding sequence and flanking regions.
cttcactattgatgatagtaacaggttggtttggtttaatcgaaccgcgcttaatacgaccaataccaataacgcctacatagttgttgtagtctaattgtgaaatttgcatttggaatggcgcatcaagttctacttttggcggttctacatgtttcacaatggcttcaaataatggggtcatatcttccgctaaatcttcgtgttcaagaccagcaacaccatttaatgctgaagcatagataatagggaagtctaattgttcatcgcttgcaccaagattgacaaataagtcaaacacttgatccacaacccagtcaggacgtgcaccagggcgatcaactttattaattacgacgattggttttaagccgtgagcgaatgctttttgtgtaacgaaacgcgtttgtggcattgggccatcaaacgcatcaacaactaatagaacagaatccaccatagaaagtacacgttcaacttcgccaccgaagtctgcgtgccctggagtatccacgatgttaatgcggtagtcattccagttaatcgcggtattttttgcaagaatggtaatgccacgttctttttcaagatcgtttgagtccataacgcgttcatccacatcaccacgagcagattcaaaagtaccagattgttgaagaagtttatctacaagagtggttttaccatggtctacgtgcgcaataatggcgatgttacggagttttttaatatcaatttcgtttttcattgtttaatgctttaattggataagatgcaatttttattgcattgttacataaaaaatggcgcaatgaattgcaccctacatttctacatttgtcgaaaaggaaaaattatacatgtatttttctttttctgctatgactagaataagaaaaataaatttcatgaaaaaatagcatggctacgttataatgtgcgcttatcttaataagactaaccatagaggatttcctaatgccaaacgcaaatgcaattgccaatgtatttaagctaattgaagaaaataatgtgaaatttgtacttcttcgatttaccgatattaaaggtaaagaacatggtgtttctatcccagttagccttgttgatgaagatatgtttgaagacggcaagatgtttgatggttcctctgttgaaggatggaaaaccattaataaagccgatatgttgcttatgccaatggctgaaacggcaattgttgatccattcgcgcaaattccaacgctttctattcgttgtagtgtttatgaaccaacgacaatgcaaagctatgatcgcgatccgcgctctattgcaattcgtgcagaaaattatatgcgttcaacaggtattgctgatcaagctttttttggtccagagcctgaattcttcttatttgatgatgtgcgttttaatgtatcaatgaacaaagcatctttttctattgatgatatagaagctgcttggaacacgaataaaaaatatgaagaaggcaataacgcttatcgcccattgaaaaaaggtggatattgtgccgttgcaccgattgatagtgcgcacgatattcgttctgaaatgtgcttgattttagaagaaatgggattagtcattgaagcccatcatcatgaagtggcgactgcagggcaaaacgaaattgcgactaaatttaatacgctaactttaaaagcggatgaaactcaaatttataaacatgtcgtacaaaacgttgcattagagcacggtaaaacggcgtgttttatgcccaaaccaattactggagataatggttcgggtatgcactgtaatatgtcgttaagtaaagacggaaaaaatattttccaaggcgataaatatgcaggcctttctgaaaccgcactttactacatcggcggtatcattaagcacgctaaagccttaaatgcgttcactaatccaagtactaattcatataaacgtttagtgcctggttatgaagcaccagtattgttggcttactctgcaagcaatcgttcagcctcaattcgtatccctgctgtaaccaatccaaaagcgattcgcgtagaagcacgtttcccagatccattggcaaacccatatttagcatttgctgcattattaatggcaggtcttgatggcgtggtaaacaaaatccacccaggcgatgcgatggataaaaatctttacgatcttcctccagaagaattaaaagatattcctgcagtagcaagctcgttagaagaagcgttaaattcattagaaaaagactatgaattcttaactcaaggtggcgtatttgctaaagattttattgatgcgtttatcagtatcaaacgtaaagaagtggaacgtttaaatatggcaccacatccagttgaatttgaaatgtattatgcataatgatatataaacaagaacaatgcggtgaaatttcgccgtatttttttaaaggagtaaatatgactaagatttcttctcaaaagaatgactagattgatttaatggagcttttctgcgtattcatagcaatagctggcgtataggcctgtacggcaaaagagcagtggacttcaactgatattgggttgtgcctcgttcaaccgatttcggtaacttactgcctacacgtgtggaatatgccacattattggcgacagtgaattttcttctgtagcgttatcaggttcattgtatggtcaatttaggcacttccttctttctagagatttaaaacgccagttcttaaaacaatctgtatgggtgaaaattatactaaggagatgacagaagaataaagacatatttatattgaaaatgtagtctctaagtatttagttgttcacgaaattgatccgaagaaaaaagatttaactgagttggataaaatagctttaaaaattaccttttcagcagaaactccaaaatatg

SEQ ID NO: 186 - DNA, 20 bp, ARTIFICIAL
  Primer
gaaccgcgcttaatacgacc

SEQ ID NO: 187 - DNA, 20 bp, ARTIFICIAL
  Primer
tgaacctgataacgctacag

SEQ ID NO: 188 - DNA, 21 bp, ARTIFICIAL
  Primer
catagaggatttcctaatgcc

SEQ ID NO: 189 - DNA, 21 bp, ARTIFICIAL
  Primer
ccctgcagtcgccacttcatg

SEQ ID NO: 190 - DNA, 2736 bp, ARTIFICIAL
  Sequence of the lpp coding sequence and flanking regions.
tgtttaattttatcggatagaatagattgaatattcacgttttttcctatgttcaaattgaataataaaaataatcggttatgataccgttctttgtatatttctcaaagggacaaaatgacaaatttacaggaaaatttaaccgcactttcagcagatttagcaatatttgaaagaaaaattcagcatttagccaaagaaatgacaatagatctgtctcactatgaaattgatcatcttgcattacgggtaaatagtgagcaaagtgctaaaaattggctgatacttttattaaagtgcggtagaattttatctgataatattgttaatggtcgtaagatttatcttattgaattagaaaaaccagttaaatttgccaatcaatttgtggatattattgaacttccacttcctaaaaataaaaaatatccaattgagggctgggaacatattgagattgtaatgccatttttaccgaaagaatcgataaatgaatggattaaccgtgttaatatgtattttttatgggacaattaactcaattaaccattaaagtgagcgagcctaaagtggatggggaaagattaccaaatccatctattgcagtaagttttacggataaaacagtaaatcatacttgcattaaggttcatccttattctataaaaaaatacttgaggtttagtaaaaatgaataaattatcacttgcattcgttgtttagcaacagtagacttgagtgcttgttctgcttttcaaaaggaggaggggacttataaaggtcaaattatttttagtcaaatggaaggcaaaaatctaaaattaactgttcgtaaaaatgattgttctggtaaccagcagaaaggataggaggttgttattgtgcataagtatggttcaactttagttgttggtgcttgtgttttagtatctgacaatggtaatactaaaaacatttcaactttttctccaagaaacccactttaattccttctaatatagagaatattatatgaaaaaaacaaatatggcattagcactgttagttgcttttagtgtaactggttgtgcaaatactgatattttcagcggtgatgtttatagcgcatctcaagcaaaggaagcgcgttcaattacttatggtacgattgtttctgtacgccctgttaaaattcaagctgataatcaaggtgtagttggtacgcttggtggtggagctttaggtggtattgctggtagtacaattggcggtggtcgtggtcaagctattgcagcagtagttggtgcaattggcggtgcaatagctggaagtaaaatcgaagaaaaaatgagtcaagtaaacggtgctgaacttgtaattaagaaagatgatggtcaagagatcgttgttgttcaaaaggctgacagcagtttttgtagcttggtcgccgagttcgtatttgttggtggcggctcaagcttaaatgtttctgtgctataaccaatagcattaaagtctaatatgattaatcagtgtcttaacttagtaaggcactgatttttttataattaaattcatttaaaatatatattatcgtctatctaagataaatttaaaggactaaattagaatttagtcctttagaaaacttggaatttggttcccctttctgaacactctatctaaaatataacatttatttttcttatgaacttttttataatctttaaattttgctttaaatcaaataattcaagatgatatttaataaaatgtaagagtgaagttatagtatatttatctaagctcatatacatctcataaagtatacttttcaacactttattacttttatccacatgatatatttctagcaacgacacactattaattacttttatatctatacctatcttattaaggtaatatgtaatattttccctctttatctttttagctgtctcattttgctcatgattataaactgatgatgtttggtttccatgtagtctatattttactaatgcttcaggataattagctaaacaaccaagcctactaacctctgaccaaaacttataatcttctgcatacggataatctttattaaagattaatttatgctctctatatacatttgctctcataatcatagtgttgttatgtatcggattatagaaaagcatagcttcacaaatatcattatgtagcaatggatttttccatatatctccagttttatattgagaaccgataattccacattctttttctacaataatctctaagtatgatcccattgctgtaatatgatcatttttctccagataggtaactattttctcaatccacgatggtttagctatatcatcagcatccattcttgcaaaatatttacctgaaaaacaaccaaggcctatattcaaagaatttatgaaccctaaattatatttattactgataatttttatccttttatctaatttagatatttcttctaaatgagacaaagtcaaatctgttgaaccatcattgataactataatttctagattttcataagtctgattaataatggatgaaatgctttcatctatatattgctcagcgttataagcacaaacaataaccgatactaatggacaattttccatataagctctaattttacactcttctttaaactattttatacgttatttaaataacaaaaggagatgcatagataaccaattaaaactctcctaaattaattgt

SEQ ID NO: 191 - DNA, 20 bp, ARTIFICIAL
  Primer
cgcactttcagcagatttag

SEQ ID NO: 192 - DNA, 19 bp, ARTIFICIAL
  Primer
tccattagtacggttattg

SEQ ID NO: 193 - DNA, 20 bp, ARTIFICIAL
  Primer
ggcattagcactgttagttg

SEQ ID NO: 194 - DNA, 20 bp, ARTIFICIAL
  Primer
ccaccgccaattgtactacc

SEQ ID NO: 195 - DNA, 2700 bp, ARTIFICIAL
  Sequence of the mepA coding sequence and flanking regions.
taggctgtatcgttgatggcgtgccaccaaatctcgaattatccgagaaagatattcagccagatttagatcgtcgtaaaccaggaacatctcgatatacgacgcctcgtcgtgaagatgacgaagttcaaattttatctggtgtgtttgaaggaaaaaccacaggcacaagtattgggatgatcattaaaaatggagatcagcgttcgcaagattatggtgacattaaagatcgtttccgcccaggtcatgcggattttacctatcagcaaaagtatggaatccgtgattatcgtggcggtgggcgttcgtcagcacgtgaaacagcgatgcgggttgctgcaggggctattgcgaaaaaatatttacgcgaacattttggcattgaggtgcgaggttttttaagccaaatcggtaatataaaaattgctccgcagaaagtgggacaaattgattgggaaaaggtaaacagtaatccattcttttgtcctgatgaaagtgcggtagaaaaattcgatgaattgatccgtgaacttaaaaaagaaggagattctattggcgcaaaacttactgttattgcagaaaatgtacctgtaggattgggcgagccagtatttgaccgtttagatgccgatcttgctcacgcattaatgggaattaatgcagtaaaaggtgtagaaattggcgatggctttgctgtggttgaacaacgaggttcggaacatcgtgatgaaatgacacctaatggctttgaaagtaatcatgcaggcggtattttaggcggaattagttcaggacaaccaattatcgccactattgcactaaaaccaacttcaagcattacgattcctggtcgttcaatcaatcttaatggtgaagccgtagaagttgtaacaaaaggtcgtcacgatccttgtgtggggattcgtgctgtgccaattgcggaagctatggtggcgattgtcttattagatcatctcttacgttttaaggcacagtgtaaataatcctgtacctagggtagtatactctaggttagttcttcaataggactgaacctaggatatacttacctacagcaaaactttagaatgaataaaattttattaaaaacaaccataatttttaccgcacttttctctctgaacgttgttgcgtctcctctagattggcaaaaagtgaaacgccctattccaagtgaagatggtaaagcaagtcctattggtagttataccaacgggtgtattattggagcacaagcattaccgccgaaaggtgaaggttaccaagtgattcgcatgaatcgcaatcgttattatggtcatccaaatatgattcagtatcttgaacgtttggggcagcgagctaaagctgctgggttgccaacgatgttagtaggcgatattgccatgcccggtggtgggcggtttttaacgggtcatgctagccatcagatgggattagatgcggatatttggttaagaatgggcgaaatgtcagatgccgatgcgctcaattctgatggtaaaggtttattagttgtggatagaaaggcgcaacgagtagatgagcgcgtgtggaatagcaatcatgcgacgttaatcaagttagctgcgcaagatccaaatgtgacgcgtatttttgttaatcctgcgattaaggtaaaattatgtcaaaccgctggcaatgatcgcggttggctacacaaaattcgtccttggcatggacacaactctcattttcatgttcgtttaacttgcccagcagatgcatcttattgtgaaaatcaagcgcctgtgcctgctggtgatggttgtggagacgaattatattcttggtttgaaccgccaaaaccaggcacttcagtgagcaaacctaaagttacaccgcctgagccgtttttgtgccaacagattttgaactcaccgaatcggagagaatggttagaatagcattgaggtaaatcaatatggatatcggcattgatcttttagcaatattgttttgtgttggttttgtcgcatcatttatcgatgcaattgctggcggtggtggattaatcaccattccagcgttactcatgacaggtatgccaccagcaatggcgttaggcaccaacaaattgcaagctatgggcggtgcattatccgcaagcctttatttcttgcgaaaaagagcggtcaatttacgcgatatttggtttattttgatttgggttttcttaggttctgccctaggtacattattaattcaatcaattgacgtggcgattttcaaaaaaatgcttccttttttgattttagccattggtctatattttttatttactcctaaattaggtgatgaagatcgaaaacaacgattaagttatctgttatttggtcttttagttagcccatttttaggtttttatgatggcttctttgggccagggactggctcaatcatgagtttagcctgtgttactttgctaggatttaatctcccgaaagcggcagcacatgcaaaagtgatgaacttcacttcgaaccttgcttcttttgcacttttcttattgggcggacaaattctttggaaagtgggtttcgtgatgatggctgggagcattttaggtgcaaatttaggtgccaaaatggtgatgacgaaaggtaaaaccttgattcgaccgatggttgttatcatgtcttttatgatgacggc

SEQ ID NO: 196 - DNA, 20 bp, ARTIFICIAL
  Primer
atctcgatatacgacgcctc

SEQ ID NO: 197 - DNA, 20 bp, ARTIFICIAL
  Primer
aaccatcggtcgaatcaagg

SEQ ID NO: 198 - DNA, 20 bp, ARTIFICIAL
  Primer
tctctgaacgttgttgcgtc

SEQ ID NO: 199 - DNA, 20 bp, ARTIFICIAL
  Primer
gagttgtgtccatgccaagg

SEQ ID NO: 200 - DNA, 2625 bp, ARTIFICIAL
  Sequence of the mtgA coding sequence and flanking regions.
ttgctatggcaatcgctcgtcaagaaagtgcttggaatccaatggcacaatcttcagcaaatgctcgaggcttaatgcagcttttgccaagtacggcaaaattgactgcagagaataatcaactaccttatcaaggcgaacaagatttattcaaaccattgaataatattttgctaggtaccgcacatcttaatgaactcaatggaaaatatcctaataatcgaatattgattgcagccgcttataatgcaggggcaaatcgagtaggaaaatggttaagtcgtgcgagtggaaaattagcattagatgaatttgttgcatctattcctttttatgaaactcgtggttatgtgcaaaatgtagtcgcttatgatttttactatcaaattttgcaaaataaagaaaacccacaaatctttagccaagaagaattgaatcggctatactaaatgcactagtttaatagtgtaaaatgggagcataattatgtatatcagccgtaatttagagcaatggaatgcatttcttcaaatgctaaaaattgcctttgaagaaaacaaagcgcaggaatttctaaccttattattaactgcagacgaacgagatgctgtaggattacgcttgcagattgtctctcagctgattgataaaaatatgcctcagcgtgaaattcaacaaaatctgaatacaagtgccgccacaatcactcgaggttccaatatgattaaaacgatggatcctgattttatgcaatggatgaaacaacatcttgatctcattgaaaaaaactaagcgaatttttaccgcactttctcacttatttagtcctaaatggtggaaaaaaaactggcagcgagttgtcttttgtttttttttcgccgtttttgctttgttgctgatttttcgctttgtacctattccattttccgcttatatggtacaacaaaaaatcgctaatcttttacaaggtgattttcgatatcaaatccaatataactgggttagcctagaaaatatctctccaaacattcaattagctgtgatttcatcagaagatcagcgttttcttgaacatttaggctttgattttgaggctatccaacgagcaattcggtataacgaaaaatctaacaaaggaatccgaggggcatcaactatttcccagcaaactgctaaaaacttaatgctttggcacggacaaaattggctacgaaaaggtttagaagttccagcgactatgttgcttgagctgacttggtcgaaaaaacgtattttagaagtgtatttaaatattgcggaatttggaaacggcatttttggtgtggaagcggcaagtcgctattactttaaaaaatcagctaaaaatttatctcaaaatgaagccgcacttttagctgctgtgttgcccaatccaatcatttataaagtaaataagccaagcttattagttcgtaaaaaacaaacttggattttgagacaaatgggaaatttaggcactgaatacttgagccatttataaaaaatgcaatcgaatttctaaagtacaacaaactaaaaaatatttacttaatacacaaaataaaaaacgagtctaagactcggttttttatttataacatttttattacaagtttattaccgcaaataacacccaaacggtataaattgtggctaaaccataaaagataaatccaccagctggcacatgcactttaagatcgtgcataccgtgatgaatacggtgtaaaccacaccacattgggaaaatagtaagcactaaaataactaatttaccaatccaagaataagcaaaagtaattaaattatgcacatcgactaaaccaaatggtaataacaaaccgatgattagaataacgacaggaaggaaaattgcactcactgtgccgcccgcaccgaacattaaccatactggcggttcgccggagcgttttggattttgatcaaccattttttctctcccttaaatataaactaaaactaacgcaatcacgctaactaatgcggttaccgcccaaagtgcatttcttacaactgtgtgtggtaagcgttcatttttcacaatgatattcatcacttttggtgtcattaagaaatatgtcaccgtatgataaagcgttgcgataagcgtaataatatttaagaacactacaatagggtttcttaaaaactcaataaagctcaagatgcctaagcctggcattggattgcttgcaaaacaaagaacaccataaagcaatacaatacaaaaccatacagcaaagactgaagtcgcttcacgtagcatataagctttgtagaagtccaatttttgccaccaagtcgctgtcattggacgaacatattttttacgtttactcactgttactgacattccttcccccttagccttttggttttagcatagagataacataatctttggcactttccacttttccttggttaattgcagaagcaggatccacatgttttggacaaacttctgagcaatagccaacgaaagtacaactccaaaccccgtttttaccatttaataatgacatacgttttgctttaccatggtcacggttatcaagattataacgatgagccatcgtaatcgct

SEQ ID NO: 201 - DNA, 20 bp, ARTIFICIAL
  Primer
tgcttggaatccaatggcac

SEQ ID NO: 202 - DNA, 20 bp, ARTIFICIAL
  Primer
cgttggctcttgctcagaag

SEQ ID NO: 203 - DNA, 19 bp, ARTIFICIAL
  Primer
gctaatcttttacaaggtg

SEQ ID NO: 204 - DNA, 20 bp, ARTIFICIAL
  Primer
tggctcaagtattcagtgcc

SEQ ID NO: 205 - DNA, 2850 bp, ARTIFICIAL
  Sequence of the mraY coding sequence and flanking regions.
gtaaaagaaatgacggcaagtattttgcaacataccgcagcggattcagaagcggtactttttaccaatggtaacttcaataacgatataggtgtgcctttaactctacttcgcttaacagaaaaacatcgttttgctgtgattgaacttggtgcaaatcatcaaaatgaaatcaattacaccacaaaattagttcaacctaatgccgcattgattaataatattgcgcccgcacatttagaggggtttggttctttagcgggggttgttcaagcaaaaggcgagatttatcgaggtttaacaaaaaatggtgtggcgattatcaatgctgaacataatcacttagatatttggcaaaaagaaatcagtaatcacgccattcaatatttcaacggtaaagattattctgcaaaaaatattcatcatacttctcaaggctccacttttacacttatttccccacaaggtgaaattgagattaccttaccttaccttggtgaacataatgtaaaaaatgccttggcagcgaccgcacttgcaatgaatgtcggtgccactcttacagatgtaaaagctggattagaacaacgttcacaagtgaaagggcgtttattccccattcaagtcacgcctaatttattgctgttagatgatacttataatgcgaataaagattctctgtgtgctgcgattgatgttttaaaaggttatgatgctttccgtattttgtgtgtcggtgatatgaaagagctaggcgaaaactctctcgctattcatcgtgaagttggacaatatattaatttggtaaatttagatttagtgtgttcttatggcaatgaaagtgcggttatttctgaggctgtttcgggtaagcattttacggataaaactgaaatggtggatttcttagttccacttattgaaaaccaattacaacaaaataaaaaagttgtggtgctaggaaaaggctcacgctcaatgaaaatggaagatgtgatctattcattaaaggataaaattaaatgttagtctggcttgctgaatatcttgttcgttacgaaaccgcgtttaatgctatttcttatattacagtccgcgcaaatcttgcattattaaccgcactttttatctcactttggattggccctaaagtgatcaaacgcttgcagatcttaaaatttggccaagaagtgcgaaatgatggccctgaaagtcactttgcaaaaaaaggcacacccactatgggtggtgtgatgattttattctctattggcgtaagtacgttattatgggcaaatcttgctaatccgtatatttgggtttgtttatttgttttatttggatacggcgcaattggttttgtggatgatttccgtaaaattacccgtaaaaatactgatggattgattgctcgttggaaatatttctggatgtctgtggtggcattagtggcaatcctttggctttattggcttggtcacgacactgatgccacccgtttagtgattccattctttaaagacattatgcctcaattaggtttgttctatattgtgttatcttactttgtgattgttggcacgggtaatgcagtgaatttaaccgacggtttagatggattagcgattatgcctactgcgcttgttgcaggtgcgtttgctttaattgcttgggctacaggtaacgtgaatttcgcagaatatttgcacattccgtatattaaatacagttctgaagtagtggtgttctgtacagctattgttggcgcgagtttgggattcttatggtttaatacttatccagctcaagtatttatgggggacgtgggttctctagcattaggtggtgcgctgggtgttgtagcaattcttgttcgtcaggaatttttgcttgtgataatgggtggtgtatttgttgttgaagcactctctgttattttgcaagtagggtcttataagttacgcaaacaacgcatttttagaatggcaccgattcaccaccattttgaattgaagggatggcctgagccaagagtgattattcggttttggattatttccttaatgctggtgttgatgggattggtcaccttgaagttgcgttaataaatatagctaggttcgctctttcacttttgaaagagcgaccttttttacgttagtaaaggaaatttatatttccatcaatgatataattttaaaatttatagcaattaagaagaaagaaaatgaacgcctatcaaaacaaaaatattactatcatcgggcttggcaaaacaggtctttcttgtgtggattatctcttatcccaacaggctaatattcgtgtgattgatactcgaaaaaatcctactggtattgataaacttcctcaaaatatccctcttcatactggtagtttaaatcaggaatggttacttgaaagcgatatgattgttattagcccagggcttgcggtaaaaacaccagaaattcaaaccgcacttaaagcgggagtggaagtaatcggcgatattgaattattctgccgcgcagcgacaaagccaattgtggggattacaggttcaaatggtaaaagtaccgtaactactttagtttatgaaatggcgaaagctgctggtgtgaaagttggtatgggcggaaatattgggattcccgctttgtcattgttgaatgaagattgtgaactttatgtactagagctttctagttttcagcttgagacaacttatagcttaaaagctgcggcagcgactgtcttgaacgtgactgaagatcatatggatcgctatatggatttagaagattatcgccaagcaaaattacgcatttatcataatgctaaagtagg

SEQ ID NO: 206 - DNA, 20 bp, ARTIFICIAL
  Primer
tgctgtgattgaacttggtg

SEQ ID NO: 207 - DNA, 20 bp, ARTIFICIAL
  Primer
cacgttcaagacagtcgctg

SEQ ID NO: 208 - DNA, 20 bp, ARTIFICIAL
  Primer
aatgttagtctggcttgctg

SEQ ID NO: 209 - DNA, 20 bp, ARTIFICIAL
  Primer
actcgcgccaacaatagctg

SEQ ID NO: 210 - DNA, 2850 bp, ARTIFICIAL
  Sequence of the murB coding sequence and flanking regions.
tattagcgaccatttgaacttcgttaaagtggaagtgatgggggctgaacattgggatattacattgggtaagcaagatgctaataatgaactacaaatcgaaaccctttctgtggataacgaagaattaggtgtactctcttggcaagcaggattaccttgtccagatccccgaattatgcaaaatttagcgcaaatgcttgctcgtgcgctttatttccataaaaatttacgtcagaaagaacagcttttattaatggaagaacgctcaattattgcgcgagagttgcacgattctttggctcaagtcttatcatttttacaaattcaacttactttgctcaaacataatctgaagaaagaagacgaacaatcaaaagaaaagagtttggcaattattgccaattttgaacaagccctttctggtggttatgcacagttacgtgagcttttagccactttccgtttaaccatacaagaagcgaatttacagcttgcactaaaacaagtgattgattcattacgctcgcaaacaacaatgcaaatgaatgtgaattgtcaattaccatcgcaaagtttgaaccctcaacagctggttcacgttctgcaaattgtacgtgaagccaccaccaatgcgatcaagcattctcaaggcacggtaattgaaattagcgcaagaattaatgcggaaggcgagtatgaaattttagttgaagatgatggggttggcattccaaaccttgaagaacctgaagggcattacggcttgaatattatggcggaacgttgtcgtcagcttaatgcacaattgcatattcatcgccgtgaacaaggcggcacacaagtcaaaattaccttgccacatacattatattaggacatcaaaatgcaaaatttacaaccttttcacactttccacattcagtctaatgctcgtgaaattattgaagcacatagtatcgaacagctacaacaagtgtgggcgaattctaaatcagaaaatttacccactctttttttaggtcaaggaagtaatgttctatttctagatgattttaatggcatcgtgatccttaatcgtttaatggggattacgcacgaacaagatgcaaattttcactatcttcacgtcaatggcggggaaaattggcataaattggtggagtggtctattaataatggtatttatggcttagaaaatctggctctgattcccggttgtgcaggctctgcccccattcaaaatatcggtgcttatggcgttgaatttaaagatgtatgtgattatgtggaggtacttaatttaaatacgaacgaaacctttagactcgacacagaacaatgtgaatttggttatcgtgagagtatttttaaacatcgttatcagcaaggttatgtgattacagcggttggattaaagctaaaaaaagattggcagcctattctaaaatatggttcgcttgtagagttcgatccgaaaacggtcaccgctaaacaaatttttgatgaagtctgtcatatccgtcaaagcaaattacctgacccaaatgaagtgggtaatgcagggagtttctttaaaaatcccgttgtcagttcagaacattttgaagaaatcaaaaaacatcacgaaaatctaccgcactttccacaggcagatggctcagtgaaattagcggcaggctggctgattgatcaatgcaatcttaaaggttttcaaattggtggggctgcggttcataaaaaacaagcattagtattaattaacaaaaacggggcaacagggcaagacgtggtcaaactcgcccatcacgttcgccaaactgttgcagaaaaatttggtgtatatttacaacctgaagtacgatttatcagtgcaactggcgaagtaaatagtgagcaaattatcacgtaattttataataattgaactttcaattgataaaatctgtcttattaacaaattggttcaataagatagcttattgtgctataactaggtacattgattggcaaaagccaaaataaagaagggaaacgatggataaagaaacacaaatgatgttagttcctcaaggcagtatcgaaggttatattcgtgcagcaaatgaatatccgatgctgaccgcagaggaagaaaaggaattggcagaacgtttgtattatcacgaggatttagatgcagcgaaaaaactcattttgtcgcatcttcgtttcgtgatccacgtggcgcgtggctattctggctatggtttgccacaagctgacttaatccaagagggcaatatcggtttaatgaaagcggtcaaacgttttaaccctgaagttggtgtacgcttggtgtcattcgctgtgcattggattaaagctgagatccacgaatatgttcttcgtaactggcgtatcgtaaaagtcgcaaccacgaaagctcaacgtaaattatttttcaacttacgtaaaactaaacaacgtttaggttggttcaatgaaaatgaagttgatatggtcgcaaatgaattgggtgtttccaaagaagatgtgatcgaaatggaatctcgaatgagcggtgcggatgtcggttttgatttacccactgatgatgcagaaacagagacctattctccagccctttatttggaagataaaagttctaatttcgcagcagagctggaaaatgaaaactttgaaagccaagcaaccgagcaattaggtgcggcgttacaaagtctagatgcacgtagtcaggatattatcaaagctcgttggttagatgataacaaagccacattgcacgacttggcagcaaaatataatgtctctgcggaacgtattcgtcaattagaaactaatgca

SEQ ID NO: 211 - DNA, 20 bp, ARTIFICIAL
  Primer
gtactctcttggcaagcagg

SEQ ID NO: 212 - DNA, 20 bp, ARTIFICIAL
  Primer
ctaattgctcggttgcttgg

SEQ ID NO: 213 - DNA, 20 bp, ARTIFICIAL
  Primer
ccacattcagtctaatgctc

SEQ ID NO: 214 - DNA, 20 bp, ARTIFICIAL
  Primer
aatccaaccgctgtaatcac

SEQ ID NO: 215 - DNA, 2850 bp, ARTIFICIAL
  Sequence of the murC coding sequence and flanking regions.
tggtaaaggtataaaagctttgttaaatgcgccttttgccatttttcgtgcggtgttgcaggcaaaaaaaattattcaagaagaaaagcctgacgctgtacttggtatgggaggctatgtttctggccccgctggcgttgcggcaaaactttgtggtgtaccaatcattttacatgaacaaaatgcgatagcgggtttaacgaataagttattaggtaaaattgcaacctgtgtattacaggcatttccaactgcttttcctcatgctgaagtagtaggaaacccagttcgagaagatttatttgagatgccaaatcctgatattcgtttttcggatcgtgaggaaaaattacgtgtcttagtggttggtggtagtcaaggagcgagagtgcttaatcatactttacctaaagtagtcgcccagcttgcagataaattagagtttcgtcatcaagtaggtaaaggtgcggtagaagaagtcagccaactttatggcgagaatttagaacaagttaaaataacagaatttattgataatatggcagaggcttatgcttgggctgatgtggttatttgccgttctggcgcattaaccgtatgtgaaattgcagcagtgggagccgcagcaatttttgtaccattccaacataaagatcgccaacaatatttaaatgcgaaatatttatcagatgttggcgcggcgaaaattatagaacaggcagatttaacgcctgaaattctagtgaattatttaaaaaatttaactcgtgaaaatttattgcagatggcattgaaagcgaaaacaatgtcgatgcctaatgcggcacaacgtgtagctgaagtaattaaacaatattcaaactaggggttgtggcgttttataaatagcctcagtcataagtattttttatatccaaaagtgctaatattagaaataaaaacgttgcgaattttaaccgcacttttagttgagttttgtcattgggagaaaaggaaaaataaatgaaacattcccacgaagaaattagaaaaattatccctgaaatgcgccgtgtacagcaaattcatttcattggcattggtggtgcgggaatgagcggcattgcagaaattttattaaatgaaggttatcaaatttcaggttcagatattgccgatggcgtagtcactcaacgtttagctcaagctggggcaaaaatctacattggtcatgcagaagaacatattgaaggtgccagtgttgttgttgtgtctagtgcgataaaagatgataaccctgaattagttacatcgaaacaaaaacgcattccagtgattcaacgcgcacaaatgttggcggagattatgcgttttcgtcacggtattgctgttgcaggaacacacgggaaaacgacaacaacagcaatgatttcaatgatttacacccaagctaaacttgatccgacttttgtaaatggcggtttagtgaaatcggcgggtaagaatgcacatttaggagcaagtcgttatttaattgccgaagccgatgaaagtgatgcgtcgtttttgcatttacagccaatggtatctgttgtaactaatatggagccagaccatatggatacttacgaaggcgattttgaaaaaatgaaagccacttatgtgaaattcctgcataatttacccttctatggtttagccgtgatgtgcgctgatgatcctgttttaatggaacttgtgccaaaagttggtcgccaagtgattacatatggttttagtgaacaggcagattatcgcattgaagattatgaacaaacaggttttcaaggtcattacacggtgatttgcccaaataatgaacgtattaatgtgttgctcaatgttcctggaaaacataatgcattaaatgcaacggctgcacttgctgtagcaaaagaagagggtattgctaacgaggcaattttagaagctctggctgattttcagggggctggtcgtcgttttgatcagctaggcgaatttattcgtccaaatggtaaagtgcgtttagttgatgattatggtcatcatccaacagaagtaggcgtaaccattaaagcggcgcgagaaggctggggagataaacgtattgtaatgattttccaaccgcatcgttattctcgcactcgtgatttgtttgatgattttgtacaagtgctttcgcaagtagacgctttgattatgcttgatgtgtacgcagcgggagaagcccctattgttggcgctgacagtaaatctctttgccgttccattcgtaatcttggtaaagttgatcctattttggtatcagatacttcgcaactaggcgatgttctcgatcaaattattcaagatggcgatttgattttggcacaaggtgctggtagcgtaagtaaaatttctcgtggcttggctgaatcttggaagaattaatgccagatggattgattgaaaatcttagtattagaaaagtatcatcagtaagaagaaaaacaggatagaaaatgaacttaaaacaagaaaaaatcgcggtgttattaggcggcacatctgctgaacgtgaagtttctctcaattcaggcaaagcggtattagaagcattattaaagcaaggttataatgcacatcctattgatcctaaagaatataatgttgcaaatcttaaaaaggatggctttaatcgagcatttaatattttgcacggtcgtggtggagaagatggcacaatgcaaggtttattagagcaaattggtttgccttatacgggttgtggcgtgatggcttctgcattaacgatggacaaaatgcgtacaaaaatgttgtggaaagcttttggtttacctgttgcagata

SEQ ID NO: 216 - DNA, 20 bp, ARTIFICIAL
  Primer
tgacgctgtacttggtatgg

SEQ ID NO: 217 - DNA, 20 bp, ARTIFICIAL
  Primer
tttgccatcttctccaccac

SEQ ID NO: 218 - DNA, 20 bp, ARTIFICIAL
  Primer
tatccctgaaatgcgccgtg

SEQ ID NO: 219 - DNA, 20 bp, ARTIFICIAL
  Primer
caggatcatcagcgcagatc

SEQ ID NO: 220 - DNA, 2925 bp, ARTIFICIAL
  Sequence of the murD coding sequence and flanking regions.
aatcttgctaatccgtatatttgggtttgtttatttgttttatttggatacggcgcaattggttttgtggatgatttccgtaaaattacccgtaaaaatactgatggattgattgctcgttggaaatatttctggatgtctgtggtggcattagtggcaatcctttggctttattggcttggtcacgacactgatgccacccgtttagtgattccattctttaaagacattatgcctcaattaggtttgttctatattgtgttatcttactttgtgattgttggcacgggtaatgcagtgaatttaaccgacggtttagatggattagcgattatgcctactgcgcttgttgcaggtgcgtttgctttaattgcttgggctacaggtaacgtgaatttcgcagaatatttgcacattccgtatattaaatacagttctgaagtagtggtgttctgtacagctattgttggcgcgagtttgggattcttatggtttaatacttatccagctcaagtatttatgggggacgtgggttctctagcattaggtggtgcgctgggtgttgtagcaattcttgttcgtcaggaatttttgcttgtgataatgggtggtgtatttgttgttgaagcactctctgttattttgcaagtagggtcttataagttacgcaaacaacgcatttttagaatggcaccgattcaccaccattttgaattgaagggatggcctgagccaagagtgattattcggttttggattatttccttaatgctggtgttgatgggattggtcaccttgaagttgcgttaataaatatagctaggttcgctctttcacttttgaaagagcgaccttttttacgttagtaaaggaaatttatatttccatcaatgatataattttaaaatttatagcaattaagaagaaagaaaatgaacgcctatcaaaacaaaaatattactatcatcgggcttggcaaaacaggtctttcttgtgtggattatctcttatcccaacaggctaatattcgtgtgattgatactcgaaaaaatcctactggtattgataaacttcctcaaaatatccctcttcatactggtagtttaaatcaggaatggttacttgaaagcgatatgattgttattagcccagggcttgcggtaaaaacaccagaaattcaaaccgcacttaaagcgggagtggaagtaatcggcgatattgaattattctgccgcgcagcgacaaagccaattgtggggattacaggttcaaatggtaaaagtaccgtaactactttagtttatgaaatggcgaaagctgctggtgtgaaagttggtatgggcggaaatattgggattcccgctttgtcattgttgaatgaagattgtgaactttatgtactagagctttctagttttcagcttgagacaacttatagcttaaaagctgcggcagcgactgtcttgaacgtgactgaagatcatatggatcgctatatggatttagaagattatcgccaagcaaaattacgcatttatcataatgctaaagtaggtgtgttgaacaatgaagataggctgacttttggggaaaacgaaaatcaagcgaaacataccgtttcttttgcggaaaatagtgcggattattggctaaaaactgaaaatggcaagcaatatttaatggtaaaagatgaagtgattttaccttgtgaagaagctacattggttggtcgccataattatatgaacattttggcagcaacagcattggcacaagctataggtattaatttagattcaattcgtaccgcacttcgtcatttcaaagggttagatcatcgttttcaattagtgcatcaagctaatggcattcgttggattaatgactctaaagcaacaaatgtggggagtacagttgctgcattggctgggctttatattgagggtaaattgcatttgttgctaggcggagacggaaaaggggctgatttttcagaattagctgaattaattaatcaaccacacattatttgttattgttttggtcgagatggtgcgctgcttgcaaaattttcatcgcaaagttatttgttcgatacaatggaacaagcgatagaatttttacgcccaacattgcaaagcggagatatggtattattgtcgcctgcttgtgcaagtctcgatcagtttgcttcttttgaaaagcgcggcgaagaatttacgcatttagctcaatgtttaacctaatttagtaactcacgaaataagatggaatttttacaaaatatcaaaaaaaattacgatgaatggacacgcatcacacctcaaggtttgttgtatgatcgcgcactattttggttatttgttattttgcttttaattggtttagtggcagtaacatctgcttctattccttatagctctcgtttatttaatgatcctttttactttgcaaaacgcgacgctatttatgtgctactttctttactcacttgttatatttcattacaaatttcttcttcgcaatgggaaaaatggcacgctaaaatttttttattttctgtcatattattattgcttgtcccttttatcggtacatcggttaatggcgcaaaacgttggatttcgttgggaatcttaaactttcaacctgcagaatttgcaaaattggctttgacttgttttttagcaagttatttcactcgtcgttatgatgaagtgcggtcgcgacatgttagtatttttaaaccgtttattgttatgcttgtattgggttgttttcttttattgcaacctgatttaggtagtacagtcgtgctatttattattatgtctgggatgctttttatcgtaggggcgaaaattttacagtttgtaggattgatagcattaggtggaatcttattcgtttggctagtattgaccg

SEQ ID NO: 221 - DNA, 20 bp, ARTIFICIAL
  Primer
ggtggcattagtggcaatcc

SEQ ID NO: 222 - DNA, 20 bp, ARTIFICIAL
  Primer
ccacctaatgctatcaatcc

SEQ ID NO: 223 - DNA, 20 bp, ARTIFICIAL
  Primer
attactatcatcgggcttgg

SEQ ID NO: 224 - DNA, 20 bp, ARTIFICIAL
  Primer
cgaccaaccaatgtagcttc

SEQ ID NO: 225 - DNA, 5640 bp, ARTIFICIAL
  Sequence of the murE, murF and mraY coding sequences and flanking regions
ctatggcgactgcgccctcttataatccaaacaaccgtgtcggcgtgaaatcagagttaatgcgtaaccgtgcaattaccgatacttttgagccaggttctacggtaaaacctttcgttgttttaaccgcacttcaacgaggtgtagttaaacgagatgaaattattgatactacgtcctttaaattaagcggtaaagaaattgtggacgttgcaccacgtgctcagcaaactttagacgagattttaatgaactctagtaaccgtggtgtaagtcgtcttgcattacgtatgccacctagtgcattaatggaaacttatcaaaatgcaggtttaagtaaaccgacagatttaggcttgatcggagagcaagttgggattttgaatgcaaatcgtaaacgctgggcagatattgagcgtgcaacagtcgcttatggttatggtattactgcgacacctttacaaattgctcgtgcctatgcaacccttggtagtttcggtgtttatcgtccgctttctatcactaaagttgatccgccagttattgggaaacgggttttctctgaaaaaataactaaagatattgtgggaattttagagaaagtagcaattaaaaataaacgcgcaatggtggaaggctaccgtgtcggcgtaaaaacaggtacggcacgtaagattgaaaatggacattatgtaaataagtatgtggcatttactgcgggtattgcaccaattagtgatcctcgttatgcattagtggttttgatcaatgatccaaaagcaggagaatattatggtggtgcggtttctgcccctgtattctctaacattatgggctatgcgttacgtgcaaatgctattccgcaagatgctgaagcagctgaaaacacaacaacgaaaagtgcaaaacgtattgtttatattggcgaacacaagaatcaaaaagtgaattaaggaaaaattatgaaaaaactcaccgcactttttaatttgcctgaattaaagaatgatatagaactccataatatggtgttagatagccgtaaggttaaagctggcgatctttttgtggcgataaaaggtcatcaggtggatggaaatcaatttattgattctgctcttcattctggtgcgagtgcggtggtttctgagacagaattatccagcgagcatttaactgtagcgtttatcgggaatgttcccgtagtgaaatattatcaacttgcacatcatctttcatctttggcggatgttttctatgattcgccctctaacaatttaacccttgttggtgtcacggggacaaatggcaaaaccactatttctcaattattagcgcaatgggcggaattattggggcatcgtgcggctgtgatgggaaccattggtaatggactttttgggcaaattgtagaagctaaaaatacgacaggttcagcagtagaaattcagtcatctctttcagctttcaaacacgcaggtgcagattttacctctattgaagtttcatcacacggtttggcgcagcatcgtgtagaagccttgcattttaaagcagcaattttcacgaatttaacccgtgatcatctagattatcatcaatctatggaaaattatgctgcagcgaagaaacgcttgttcactgaattagatacccaaattaaagtgattaatgctgatgatgaaattggataccaatggctaactgaactacctgatgctattgccgtaagtatgaatgcggattttaaagtaggttcacaccaatggatgaaagcaataaatatccattatcattttaaaggtgcagatattacttttgaatctagctggggtaatggtgttttgcatagcccattaattggtgcttttaatgtaagtaatttattattagtaatgaccacgttgttatcgtttggttacccattggaaaatttactcgctacggcgaaatctttaaaaggagtatgtggaagaatggaaatgattcaatatccaaataaaccaaccgttattgtagattatgcgcatacaccagatgcgttggaaaaagcgttgattgctgcgcgtgaacattgccaaggcgaattatggtgcatttttggttgtggcggagaccgtgatagaggcaaacgtccgttaatggcacaggttgcagagcagtttgctgaaaagattattgtgacaaaagataatccacgaacagaatcacaaagccaaattgaaacagatattgtcgctggctttaaaaatatggaaaaagtggggattattcctgatcgcgcacaggcgatccagtttgcgattgaaagtgcggtagaaaatgacgtgattttaattgctggaaaggggcacgagcattatcaaattattggttcggaagttgtgcatttttccgaccaagaaattgcacttgatttcttaaaataataatcactcaattatgattaaactctctactgtacaacttgcacagattcttcaagctaaattaattggcgatgaaaatgtgcaagttgaaaaaattaatacggatactcgaaaaagcgtatcaaatagcttattttttgctttaaaaggcgaaaaatttgatgctcatcaatatcttgatcaagcggtgtcacagggtgcgcttgcgcttgttgttcagcaagaaaattcatccatttctgttccacaattggtggttaaggatacccgtattgccttgggtgaacttgcaaaatggttacgtgagaaaattaatccacgtactgtggcgatgaccggctcttctggtaaaaccacggtaaaagaaatgacggcaagtattttgcaacataccgcagcggattcagaagcggtactttttaccaatggtaacttcaataacgatataggtgtgcctttaactctacttcgcttaacagaaaaacatcgttttgctgtgattgaacttggtgcaaatcatcaaaatgaaatcaattacaccacaaaattagttcaacctaatgccgcattgattaataatattgcgcccgcacatttagaggggtttggttctttagcgggggttgttcaagcaaaaggcgagatttatcgaggtttaacaaaaaatggtgtggcgattatcaatgctgaacataatcacttagatatttggcaaaaagaaatcagtaatcacgccattcaatatttcaacggtaaagattattctgcaaaaaatattcatcatacttctcaaggctccacttttacacttatttccccacaaggtgaaattgagattaccttaccttaccttggtgaacataatgtaaaaaatgccttggcagcgaccgcacttgcaatgaatgtcggtgccactcttacagatgtaaaagctggattagaacaacgttcacaagtgaaagggcgtttattccccattcaagtcacgcctaatttattgctgttagatgatacttataatgcgaataaagattctctgtgtgctgcgattgatgttttaaaaggttatgatgctttccgtattttgtgtgtcggtgatatgaaagagctaggcgaaaactctctcgctattcatcgtgaagttggacaatatattaatttggtaaatttagatttagtgtgttcttatggcaatgaaagtgcggttatttctgaggctgtttcgggtaagcattttacggataaaactgaaatggtggatttcttagttccacttattgaaaaccaattacaacaaaataaaaaagttgtggtgctaggaaaaggctcacgctcaatgaaaatggaagatgtgatctattcattaaaggataaaattaaatgttagtctggcttgctgaatatcttgttcgttacgaaaccgcgtttaatgctatttcttatattacagtccgcgcaaatcttgcattattaaccgcactttttatctcactttggattggccctaaagtgatcaaacgcttgcagatcttaaaatttggccaagaagtgcgaaatgatggccctgaaagtcactttgcaaaaaaaggcacacccactatgggtggtgtgatgattttattctctattggcgtaagtacgttattatgggcaaatcttgctaatccgtatatttgggtttgtttatttgttttatttggatacggcgcaattggttttgtggatgatttccgtaaaattacccgtaaaaatactgatggattgattgctcgttggaaatatttctggatgtctgtggtggcattagtggcaatcctttggctttattggcttggtcacgacactgatgccacccgtttagtgattccattctttaaagacattatgcctcaattaggtttgttctatattgtgttatcttactttgtgattgttggcacgggtaatgcagtgaatttaaccgacggtttagatggattagcgattatgcctactgcgcttgttgcaggtgcgtttgctttaattgcttgggctacaggtaacgtgaatttcgcagaatatttgcacattccgtatattaaatacagttctgaagtagtggtgttctgtacagctattgttggcgcgagtttgggattcttatggtttaatacttatccagctcaagtatttatgggggacgtgggttctctagcattaggtggtgcgctgggtgttgtagcaattcttgttcgtcaggaatttttgcttgtgataatgggtggtgtatttgttgttgaagcactctctgttattttgcaagtagggtcttataagttacgcaaacaacgcatttttagaatggcaccgattcaccaccattttgaattgaagggatggcctgagccaagagtgattattcggttttggattatttccttaatgctggtgttgatgggattggtcaccttgaagttgcgttaataaatatagctaggttcgctctttcacttttgaaagagcgaccttttttacgttagtaaaggaaatttatatttccatcaatgatataattttaaaatttatagcaattaagaagaaagaaaatgaacgcctatcaaaacaaaaatattactatcatcgggcttggcaaaacaggtctttcttgtgtggattatctcttatcccaacaggctaatattcgtgtgattgatactcgaaaaaatcctactggtattgataaacttcctcaaaatatccctcttcatactggtagtttaaatcaggaatggttacttgaaagcgatatgattgttattagcccagggcttgcggtaaaaacaccagaaattcaaaccgcacttaaagcgggagtggaagtaatcggcgatattgaattattctgccgcgcagcgacaaagccaattgtggggattacaggttcaaatggtaaaagtaccgtaactactttagtttatgaaatggcgaaagctgctggtgtgaaagttggtatgggcggaaatattgggattcccgctttgtcattgttgaatgaagattgtgaactttatgtactagagctttctagttttcagcttgagacaacttatagcttaaaagctgcggcagcgactgtcttgaacgtgactgaagatcatatggatcgctatatggatttagaagattatcgccaagcaaaattacgcatttatcataatgctaaagtaggtgt

SEQ ID NO: 226 - DNA, 20 bp, ARTIFICIAL
  Primer
actgcgccctcttataatcc

SEQ ID NO: 227 - DNA, 20 bp, ARTIFICIAL
  Primer
cacgttcaagacagtcgctg

SEQ ID NO: 228 - DNA, 24 bp, ARTIFICIAL
  Primer
ggcgaacacaagaatcaaaaagtg

SEQ ID NO: 229 - DNA, 19 bp, ARTIFICIAL
  Primer
ctcgcgccaacaatagctg

SEQ ID NO: 230 - DNA, 21 bp, ARTIFICIAL
  Primer
ccgaccaagaaattgcacttg

SEQ ID NO: 231 - DNA, 20 bp, ARTIFICIAL
  Primer
gcattgataatcgccacacc

SEQ ID NO: 232 - DNA, 2925 bp, ARTIFICIAL
  Sequence of the murG coding and flanking regions.
tcattacaaatttcttcttcgcaatgggaaaaatggcacgctaaaatttttttattttctgtcatattattattgcttgtcccttttatcggtacatcggttaatggcgcaaaacgttggatttcgttgggaatcttaaactttcaacctgcagaatttgcaaaattggctttgacttgttttttagcaagttatttcactcgtcgttatgatgaagtgcggtcgcgacatgttagtatttttaaaccgtttattgttatgcttgtattgggttgttttcttttattgcaacctgatttaggtagtacagtcgtgctatttattattatgtctgggatgctttttatcgtaggggcgaaaattttacagtttgtaggattgatagcattaggtggaatcttattcgtttggctagtattgaccgcctcttatcggttaaagcgatttataggttttttagaaccctttaaagaaccttatggcactggtttccaattaacaaactctcttatagcatttgggcggggagaaattactggcgaaggattaggtaattcaattcaaaaattagactatctgcctgaagcacataccgatttcattatggcgattatcggcgaagaatttggatttatcggtatattgattgttattcttttattaggtttattaatttttcgtgcaatgaaaattggacgagaatccttaatgttagaacaacgttttcgaggtttttttgcattaggtattggtttttggattttctttcaaggctttgtgaatttaggtatggctcttggaatgctaccaactaaaggtttaacctttccactcgtgagttatggtggttcgagtattatcattatgtccgccactattggtattttattgcgaattgatcacgaaaatcgtttatttcgtataggtcaagcacgcttgcgtgatgattagagatagaaaagatgaaaaataaaaaattattagtgatggcgggtggtactggcggtcatgtttttcctgccattgcagttgctcaaactttacaaaaacaagaatgggatatttgctggttaggtacgaaagatagaatggaggctcaacttgtaccaaaatatggtattcctattcgatttattcaaatttctggtttgcgtggtaaaggtataaaagctttgttaaatgcgccttttgccatttttcgtgcggtgttgcaggcaaaaaaaattattcaagaagaaaagcctgacgctgtacttggtatgggaggctatgtttctggccccgctggcgttgcggcaaaactttgtggtgtaccaatcattttacatgaacaaaatgcgatagcgggtttaacgaataagttattaggtaaaattgcaacctgtgtattacaggcatttccaactgcttttcctcatgctgaagtagtaggaaacccagttcgagaagatttatttgagatgccaaatcctgatattcgtttttcggatcgtgaggaaaaattacgtgtcttagtggttggtggtagtcaaggagcgagagtgcttaatcatactttacctaaagtagtcgcccagcttgcagataaattagagtttcgtcatcaagtaggtaaaggtgcggtagaagaagtcagccaactttatggcgagaatttagaacaagttaaaataacagaatttattgataatatggcagaggcttatgcttgggctgatgtggttatttgccgttctggcgcattaaccgtatgtgaaattgcagcagtgggagccgcagcaatttttgtaccattccaacataaagatcgccaacaatatttaaatgcgaaatatttatcagatgttggcgcggcgaaaattatagaacaggcagatttaacgcctgaaattctagtgaattatttaaaaaatttaactcgtgaaaatttattgcagatggcattgaaagcgaaaacaatgtcgatgcctaatgcggcacaacgtgtagctgaagtaattaaacaatattcaaactaggggttgtggcgttttataaatagcctcagtcataagtattttttatatccaaaagtgctaatattagaaataaaaacgttgcgaattttaaccgcacttttagttgagttttgtcattgggagaaaaggaaaaataaatgaaacattcccacgaagaaattagaaaaattatccctgaaatgcgccgtgtacagcaaattcatttcattggcattggtggtgcgggaatgagcggcattgcagaaattttattaaatgaaggttatcaaatttcaggttcagatattgccgatggcgtagtcactcaacgtttagctcaagctggggcaaaaatctacattggtcatgcagaagaacatattgaaggtgccagtgttgttgttgtgtctagtgcgataaaagatgataaccctgaattagttacatcgaaacaaaaacgcattccagtgattcaacgcgcacaaatgttggcggagattatgcgttttcgtcacggtattgctgttgcaggaacacacgggaaaacgacaacaacagcaatgatttcaatgatttacacccaagctaaacttgatccgacttttgtaaatggcggtttagtgaaatcggcgggtaagaatgcacatttaggagcaagtcgttatttaattgccgaagccgatgaaagtgatgcgtcgtttttgcatttacagccaatggtatctgttgtaactaatatggagccagaccatatggatacttacgaaggcgattttgaaaaaatgaaagccacttatgtgaaattcctgcataatttacccttctatggtttagccgtgatgtgcgctgatgatcctgttttaatggaacttgtgccaaaagttggtcgccaagtgattacatatggttttagtgaacaggcagatta

SEQ ID NO: 233 - DNA, 20 bp, ARTIFICIAL
  Primer
cgttatgatgaagtgcggtc

SEQ ID NO: 234 - DNA, 21 bp, ARTIFICIAL
  Primer
acaggatcatcagcgcacatc

SEQ ID NO: 235 - DNA, 20 bp, ARTIFICIAL
  Primer
tcaagcacgcttgcgtgatg

SEQ ID NO: 236 - DNA, 20 bp, ARTIFICIAL
  Primer
gttggctgacttcttctacc

SEQ ID NO: 237 - DNA, 2887 bp, ARTIFICIAL
  Sequence of the murI coding sequence and flanking regions.
tgaagttggctggttggcaggtaaagtaaaaggaaaatcaagacaagcagagcttgaaaaaatcaaaactggcgcggtgcaaatggtggtggggacgcatgctttattccaagaagaagtcgagttttccgacttagcattagtgattattgatgaacaacatcgttttggggtgcatcaacgattaatgttgcgtgaaaaaggcgaaaaagcgggattttatccccatcagttaattatgacggccacgccgattccgagaacgttggcaatgaccgtatatgcagatttggatacatcaattattgatgaattgcctccaggtcgtacgccgataacaaccgtagtggtttctgaagaacgtcgagctgaaattgtgatgcgtgtaaaaaacgcttgtgttaatgaaaaacgtcaagcctattgggtgtgtacgttaattgatgaatcagaggtgttagaagctcaagcagctgaagcgatttgggaagatttaacgaaagcgttaccgatgttaaatattggtttagtgcacgggcgcatgaaaccccaagaaaaacaagatgtcatgatgcgttttaaaaatgcagaattggatttattggtggcaacgacagtcatcgaagtgggtgttgatgttccgaatgcgagtttgatgattatcgaaaatgcagaacgtttaggtttatcgcagcttcatcagttacgagggcgcgtcggtcgaggctgcacggcttctttttgtgtactaatgtataaacctccgctaggtaaagtttcacaaaaacgcttgcaggtgctacgagatagccaagatgggtttgttatttcggaaaaagatttagaaattcgtgggccaggtgaagtacttggaacgaaacaaacgggaattgctgaattgcgagtagcaaatttaatgcgagatagaaaaatgataccaacggtgcaacattatgcgaaatcacttatccaaaaataccctgatgtggcagaaagcctaatccgtcgctggctcaataataaagaaatttactcgaacgcttaaaagtgcggtcaattttcaaagagttttaaatggataaaaaagaaaaacgcccaacagtgctcttttttgattctggagtgggtgggtttagcgtatatcgtgaagccaaaaaactattacccaattggcattatctctattgctttgataatgcgggattcccttattcagaacgcaaagaagaaagtattattcaccgaactttagcggcgtgtcagcttattaatcaacgttatccattagatgcaatggtgatagcttgcaatacagcgagtactgttgtgcttccgcctttgcgagctgcttttgatattcctatcattgggactgtacccgctattaaacctgcatcagaaataacaaagacaaaacatattggtttattagctacaaaggggactgtaaaacgtcattatatcgatgagttgattgataaatttgcgcaagattgtattgttgagagactgggaacgacaaaattagtcgaaattgcggagcaaaaaattcgtggtcattccgttgatctcattagtttaaaagatgagttatcttcgtgggcaggcatggcagatttggatacattagttttaggttgtactcactttcctctcatcaaagatgaaattcagttatgcttgccacaagttaaatattttatggaaccgagcgcagcaattgctaaacggatcaaatatttacttgatgataaaaatctacaagcgcaaaatgaaaaatataatcaaatgttttgcaccgcacattttcccgaagaatctcaatttaaaaaagctttacatctatggggatttgaatctttggaagtaatcaaaatagattaaaagttaatagattaattgtgtgatattgataaattcacaatttttcctaattttataggtgatttttctacttatatcatttctatatgtcacttttttaaaataaattgtgatctagttctcaaaataattatgatttttattgaatttgttaaaatagtgttataatacctctcaggtttctcactattttattgaataagaggtaaaaatgattatttcatcagctagcgattatcgtgaagcggcgcgtcgccgtgttcctccctttatgttccattatgccgatggcggttcttatgccgagcaaacacttgcgcgtaatgtgagtgatttggaaaatattgctttaagacaacgtgtcttaaaagatatgtctgaattggatactagtatagaattatttggtgaaaaactttcaatgccaactattcttgcaccagttggggcgtgcggaatgtatgcgcgtcgtggagaagtacaagcagcacaagcggcggacaataaaggtgtgccgtttaccctttcaacagtatcaatttgtccaattgaagaagtcgcccctgcgattaagcgtccaatgtggtttcagctttatgtgttaaaagatcgtggttttatgaaaaacgcgcttgagcgtgcgaaagcagcaggctgttctactttagtgtttacggtcgatatgcctactccaggtgcacgttatcgtgatatgcactcaggtatgagcgggccttacaaagaaattcgccgtgtattacaaggctttacacacccattctgggcgtatgatgtgggtatcaaaggcaaaccgcacaccttgggtaatgtttcaacttatatgggtagacaaataggtttagatgactatattggctggctaacagaaaactttgatccatcaatttcgtggaaagatttagagtggatccgtgagttttgggaaggtccaatggtcattaaaggtattctcgaccctgaagatgcgaaagatgcggtgcgt

SEQ ID NO: 238 - DNA, 20 bp, ARTIFICIAL
  Primer
gaagttggctggttggcagg

SEQ ID NO: 239 - DNA, 20 bp, ARTIFICIAL
  Primer
accgcatctttcgcatcttc

SEQ ID NO: 240 - DNA, 20 bp, ARTIFICIAL
  Primer
ttgattctggagtgggtggg

SEQ ID NO: 241 - DNA, 20 bp, ARTIFICIAL
  Primer
acttgtggcaagcataactg

SEQ ID NO: 242 - DNA, 2850 bp, ARTIFICIAL
  Sequence of the murZ coding sequence and flanking regions.
gaagatacgataaaaaattgggttggtattttaaacaaacaaggtattgatacattaatcacaaagatgcagcaatctgcctcacaacctataattttcaatcaataaatgaataactatgctaaattgggatttgcaaaaaaataatgataaaataacgctctttttgtttggggaactatctcgcagcacgttgttaccaatgtggcagcaacgtggcgtttttttgtcagcaagtacacttgataaaactattgttgaatggaatttgtctgatcttcagcatattgattctgctggttttgcagctctttgtgattttttacgagagtgtcaaaagcttaataaaacagtgcgattagtttatccaccaaaacaattattaaccctagcagatctctttggtttatctgattggatcgcaaattttatatagcttaactaaacggaaatccgatggaacttcaaaaaattgaacaaattttaaaagacacactaaatattgcagaagtctatgcacaaggtgaaaatgcacattttggtgtgattgttgtgagtgatgaaatcgctgcactatctcgtgtaaaacaacaacaaacgatttatgcccctttaatgccttattttagtactggtgaaattcacgctctaaccatcaaaacttataccgtagaaaaatggaaacgcgatcgtgcattaaaccagtttaattaaggatttaaaaatggataaatttcgtgtttatgggcaatctcgtttaagtggaagtgtgaatatttcaggcgcaaaaaacgccgcacttccaattctttttgcggctattttagcgacagaacctgttaaattgacaaatgttcccgaacttaaagatattgaaactactttgaaaattttgcgtcaattaggcgtggttgtagatcgtgatgcaactggtgcagttttattagatgcctctaatatcaatcatttcactgcaccttatgaattggttaaaactatgcgagcttcaatttgggcattggcacctttagtcgctcgtttccatcaaggtcaagtatcattacctggaggttgttctattggggctagacctgttgatctccatattagcggtttagaaaaattaggtgcggatattgttcttgaagaaggatatgtaaaagcacaagtatcggatcgtcttgtgggaactcgtattgtaatagaaaaagtaagtgtaggcgccactttatctattatgatggcagcaacccttgcgaaaggtacgactgttattgaaaacgccgctcgtgagcctgaaattgttgataccgccgatttccttaataaaatgggtgcgaaaataacaggtgcaggatctgctcacatcacgattgaaggtgttgaacgtttaactggttgtgagcacagtgtcgtgccagatcgcattgaaacgggtacattcttaattgctgcagcaatttcgggcggttgtgttgtttgtcaaaatactaaagcggatactttagatgccgtaattgataaactccgtgaagctggtgcgcaagttgatgtaactgaaaatagcattactttagatatgcttggtaatcgccctaaagcagtgaatattcgtactgcaccacatccagggttcccaactgatatgcaggctcaatttactttattaaatatggtggcagaaggtacaagcattatcactgaaacgatttttgaaaatcgttttatgcatattcctgaattaattcgtatgggtggtaaagctgaaattgaagggaatacagcggtatgtcacggggttgaacaattgtctggcacagaggtaatagcgacagatttacgcgcttcaatcagtttagtgcttgcaggttgtatcgcaacgggtgaaaccattgtagatcgtatttatcatatcgatcgtggttatgaacatatcgaagataaattacgtggcctaggtgcgaaaattgaacgtttttctggaagtgatgaagcgtaattagatacgctgcttttctattagacattacaagtttatttataatcttaaatttctattaatgcctttctttagaaaggcatttttttactgaaattttataagagtagattgattgcattgtttagaaacgtatttttctacaagaaagtgcggtagattattttcttattttgatagtaatcacttatattaattttttataactaaaattcataaaccataaataaataatctttttttttcataagtttggtttttataatcacgcttagacaaacacaacacaaggaagaaaaaatgaaaaaattactttttacgaccgcacttttaactggagctattgctttctcaacgttttctcacgcaggcgaaattgccgatcgtgttgaaaaaacgaaaactttattagtcggaacagaagggacttatgcaccatttactttccatgataaaagtggaaaattaacaggctttgatgtagaggttattcgtaaagttgctgaaaagctcggtttgaaagtggaatttaaagaaacacaatgggatgcaatgtatgcggggttaaatgcaaaacgttttgatgtgattgcaaaccaaactaacccaagcccagagcgtttaaaaaaatacagtttcacaacgccttataattattctggtggggtgattgtaacaaaatcatcggataacagtattaaatcatttgaagacttgaaaggtcgtaaatctgcgcaatctgcaacaagtaactggggtaaagatgcaaaagctgcaggtgcgcagattcttgtagtggatggtttagcacagagcttagagcttattaaacaaggccgtgcagaagcaac

SEQ ID NO: 243 - DNA, 20 bp, ARTIFICIAL
  Primer
cagcaatctgcctcacaacc

SEQ ID NO: 244 - DNA, 21 bp, ARTIFICIAL
  Primer
catacattgcatcccattgtg

SEQ ID NO: 245 - DNA, 20 bp, ARTIFICIAL
  Primer
tcgtgtttatgggcaatctc

SEQ ID NO: 246 - DNA, 20 bp, ARTIFICIAL
  Primer
cgtgatgtgagcagatcctg

SEQ ID NO: 247 - DNA, 2850 bp, ARTIFICIAL
  Sequence of the nagA coding sequence and flanking regions.
ccagaggaacaccctgaaagttaccacagctttatgtataacaattttttcaatcatatcgatattttacctgaaaatatcaatattcttaacggcaataccgatgaccataatgcagaatgccgtcgttatgaagaaaaaattaaatcctacggcaaaattcatctgtttatggggggggttggcgtagatggacatatcgcatttaatgaacctgcttcttcattaagttctcgcacccgtattaaaacgctaacgcaagatacattgattgcaaattcacgcttctttaataatgatgttactcaagtgccgaaatatgctttaaccattggtgttggcacattattagatgcagaagaagtgatgattttagcaacaggacatcaaaaagcactggcagtgcaagctgcagttgaaggcagtattaaccatttatggacagtcagtgcattacaaatgcaccgtcatttcttgcttgtttgtgatgaagctgctcaacaagagttaaaagtgaaaaccgtgaaatattttactgaattagaaggcgcagttgctggtacggattatcaggataaatagagatctattcttcatctttatgtaggggcgaattacattcgccctataatctcaacaagagctaaaagtgaaaaccgtgaaatattttactgaattagaaggcgcggttgctggtacggattatcaggataaatagagatctattcttcatctttatgtaggggcgaattacattcgccctataatcacaaacaatcatagggcaaattgtccttacgtttaagagcaatatagttgctatgttaaactgatgttgatattaggaacagaatatgaaatacgcattaattaattgtgtaatttacacaaaatatgatgttttacgtgattttgctgtaattattaacggtgaaattattgaagcagtgatcccccaagctgaattagaaacaggtatcaaaaccattgatttacaaggtaataatttaacggctggttttattgatctgcaattaaatggctgtggtggcgtgatgtttaacgaccaaactagcgttgaaaccttggaaattatgcaggaaactaacttaaaatcaggttgtacaagtttccttcccacttttattaccgcgcctgatgaaaatataaaaagtgcggtaaaaattatgcgtgaatatttaaacaagcataaaaaccaagcacttggtttacatattgaaggaccttatctcagcattgagaaaaaaggcgtacaccgtcccgaatatattcgtgaaattacgcctgaaatgaaagattttctctgcgaaaatggtgatgtgattacaaaaatgaccattgccgcagaaaacccaaccattaactatacgcctgattttgtgaaagcgggcattattgtctctgtaggccattctaatgccacttatgaagtggctaaagccgcattccacaaaggcgcaacttttgcgactcacttgcataatgcgatgtcgccaattagttctggacgtgaaatgggcgtagtgggtgcagtattagattctgatgtttacactggcattatcgtcgatggtgtgcatatcaattacggcaatgttcgcattgataaaaaaatcaaaggcgacaaactttgtattgtgactgactctattgcagctgcaggcgcaccgccagaactagaaagttttacctttgtgggaaaaacaatttatatcaaagaagggcgttgctatgatgcgaatgacacaattgcaggggcatcaatcacaatgatggaatccattaaaaatgcggtagaatatgtcgaaattcctcttgcggaagccattagaatgagtaacctttatcctgcacgagcaattggtatagatgatcgtttaggttcggtagaaaaaggtaagatagcaaacttagccgtgtttacgccaaattaccaagtaatcggcacagtagtaaacggaaagtggaaagagaattaatagtaaacacttaaatagttaattgatttaaaaatctgtgatatatatcacagattttttattaattataaaatagcctaaatatttatacacttttaacttaatcattttttaacttgattttgagcaaaaaaaaaagcgaatctttcgattcgccttgcttttaataatgtatttctaacaaatgattagaagtaaacgcgtaaacctacacccactgatttttctttttcagtttttacgcctccattagttgttttagttctagcgtaagcaccttcaatataggttaatagttgtttgtgaagtttatgatctacaccgaataatactgcttgttcacgtgttttttcaccttgatctacagaagtgcgttcatatttgaagttgccatagacattagtatcttccattaattcatattggaaacctggagatacgaaatagcgtttttcgtgtttagttttatagtttttagtttttgcatagccactatctagagacactaataagcctaaatcactaaaacgatagcctaaagttgctaatacaccatttaattgctgtgtatgctcgtcagcttcgttatatttgtagttagttctaccataagcaatttttgcaacgatgtcgtttgcatcatattttgcaccaacttgaattccattattgatttcacctatacgtacttcaccagccttatcattaggctgcttatttgtattttttgcaccctcacgcttttgtgctaataaataattagcgcctaatactaaaccatcaatacctttaaaagtatagccaacggtattaccactagtaggaatatagtcactattgttgagaacgc

SEQ ID NO: 248 - DNA, 20 bp, ARTIFICIAL
  Primer
ccataatgcagaatgccgtc

SEQ ID NO: 249 - DNA, 20 bp, ARTIFICIAL
  Primer
aacgaagctgacgagcatac

SEQ ID NO: 250 - DNA, 20 bp, ARTIFICIAL
  Primer
gatgttgatattaggaacag

SEQ ID NO: 251 - DNA, 20 bp, ARTIFICIAL
  Primer
accatcgacgataatgccag

SEQ ID NO: 252 - DNA, 2700 bp, ARTIFICIAL
  Sequence of the pal coding sequence and flanking regions.
  misc_feature (1528)..(1528): a or g or t or c
acgcaattgtaattgggcaagtggttccatcgggtaatggttatagtattacttatcaattaattgatacggttggtgcatcaggtacgccagggactgtattaatgcaaaatagctatacagtaacaaataaatggttacgctatggcgcgcatactgtgagcgatgaagtttttgaaaaattaactgcgatccgtggtgcctttagaactcgtatcgcttatgttgtgcaaaaaaatggcggttcgcaaccttatgaagttcgtgtagcagattatgatggctataatcaatttatcgtcaatcgtagtgcccaaccaattatgtctccagcttggtctccagacggccagcgtttggcttatgtatcgtttgaaaataaaaaatcacaacttgttgtacaggatttaaattctggcgcacgtaaagtagtggcatcttttcaagggcataatggcgcaccagccttttcgccagatggttctcgtttagcttttgcttcttctcgtgatggtgttctgaatatttacgttatgggagcaaatggcggtacacctactcaattgacgagtggtgcgggtaataatactgaaccagcgtggtcgccagacggaaattcaattttatttacatccgatagaagtggttcgccacaagtttatcgaatggatgcaagcggtggtagtgcaacagcagtgggtggtcgcggtagcgcacaaattagtgcagatggaaaaacacttgtgatgattaatggtaacaataatgtagttaaacaagatctcacaacgggcgtttcagaggtacttagtacatcttttctaggcgaaagcccaagcctctctccaaatggaattatgattatttatagttctacacagggcttaggaaaggtgctacaattggtttccgcagatggtcgctttaaggcgagccttccaggaagtgatggtcaagttaaatttccagcttggtctccatacttaactaaataaaaaactcatttaggagaaatctaatgaacaaatttgttaaatcattattagttgcaggttctgtagctgcattagcagcttgtagttcatctaacaacgatgctgcaggcaatggtgctgctcaaacttttggcggttactctgttgctgatcttcaacaacgttacaataccgtttatttcggttttgataaatatgacattactggtgaatacgttcaaatcttagacgcgcacgctgcatatttaaatgcaacgccagctgctaaagtattagtagaaggtaacactgatgaacgtggtacaccagaatacaacatcgcattaggccaacgtcgtgcagatgcagttaaaggttatttagctggtaaaggtgttgatgctggtaaattaggcacagtatcttacggtgaagaaaaacctgcagtattaggtcatgatgaagctgcatattctaaaaaccgtcgtgcagtgttagcgtactaattcttagtatttctaatacttgaaaaacaggatccattttttattggntcctgttttgttttcatcgtttgtaatttaaccaattagcttgaaagaatgaatttattctttcggttctagagcaaatgcgttatcataaatccatttaatacagtggggtcgttagctcagtcggtagagcagcggacttttaatccgttggtcgaaggttcgaatccttcacgacccaccactctctgatttagttgtccagttgggttgttagctcagttggtagagtagcggactcttaatccgtcagtcgagagttctagtctctcacaacccaccatttttattattcatccctaatattttaaatttctttaattagcttaaattcttgactatttttagcggttattgtggtagaatacccttaaattttagtcgggtatcattatgttggaaaatattcgtattgttttaattgaaacttcgcacagtggtaatattggttctgcggctagagcaatgaaaacgatgggattgacccagctttgtcttgtttcacctaaatctgttgatgaacaatcttatgccctttcagctggcgcagaaaatattgtaaaaaatgctagggttgtcgatagttttgatgaagccgtcgatgattgccctttggtaattggaacaagtgctcgcttacgtcatttacaaaatacattgatcgagcctcgagaatgcgcggagaaagttgtagcgtataaaggcaagatagctattgtgtttggtcgtgagcgtattggattaaccaatgaagaactgctgaaatgtcattatcacttgaatattccagcgaatcctgattattcttctttaaatttagcaatggctgtgcagctggtaagttatgaattgcgtatggctttcttagttcaaaataataagaaaaattcactttctttaatagagaaaaactatccaacaacagatcagttagcttatttttttgactacacagaacgtatatatcagtctcttggatttattcaaaatcaaggagttatgcgtaaattaaagcgtttatactatcgtgcaaaattagagaaaaacgaattaaatattttaaatggcatgctaagtgcggttgaaaaacgaattgatttaacaaaagaggataattgactaaattagtcagatatgtaagtattgcgcaattaatttttagggattcttta

SEQ ID NO: 253 - DNA, 20 bp, ARTIFICIAL
  Primer
gcatactgtgagcgatgaag

SEQ ID NO: 254 - DNA, 20 bp, ARTIFICIAL
  Primer
gcgcaatacttacatatctg

SEQ ID NO: 255 - DNA, 20 bp, ARTIFICIAL
  Primer
ttccagcttggtctccatac

SEQ ID NO: 256 - DNA, 20 bp, ARTIFICIAL
  Primer
acgctaacactgcacgacgg

SEQ ID NO: 257 - DNA, 2925 bp, ARTIFICIAL
  Sequence of the pbpG coding sequence and flanking regions.
ttcatcacgtaattcatcgtttggggcatgtaatgaaatagccaaagccacatcgatcattttgctcaaattatctaatgctggcacaacaccagaagtcgataaggttacacgacgttttgataaaccgtaggcaaaatcatctaacataatttccattgcaggaacaacattagcaacattcaataagggttcgcccattcccatcattaccacatttgtaatgggtctaacgccagttacgccaaagttgccaataattttagaggctcgccatacttgaccgataatttctgaaaccgttaaattgcggttaaagccttgttgtgcggttgaacagaaggtacaagctaaggcacagccaacttgggaagatacacaaagcgtcgcgcgatctgcttcgggaatatacacagtttcaacttgctgctcgcccacttgcattgcccattttatcgtgccatcggctgaacgctgctcaacggcaacttctggggctttaatttctgcaaccgccttaagtttttcacgtaattttttattaatgtttgtcatattgtcgaaattatcttcgccaaaatgataaatccatttaactaactgatctgctcgaaatggtttttcgccgagttctttaaaaaattcgcgcatttgttggcgcgttaaatccattagattaatttttttagcgggtgcatctgattgcacagacaataattctgacattttagcctcgttattacacattgtggcgatagcattgtgcaggtgtttttatcaaaaactcacaacgaaaaattcgcaattaaaaaatgaacggcgattgtacagatttgtcaccgcataatctagcggaattgaaaaacgatagaaaatcttaccgcacttttttgcgatctagatcgcaaatattttcaattacagcggaaaaagtgcggtaaaatatcagcctattttttaaggtgaccaataatgtttaaaaaagctttatttattttatctttgtgtccttcttttgcgttggcacagtcttatgttgtgtatgattttacccataatcgagtgttggaaagccacgcgtctgatagtattcagcctattgcctctgtaacaaaattaatgacggctaatgtatttttagagaataataaaaatcctaattgtcgaatcgcaatcacaaaagaggatacggatcgaattaaaggcactggaacaaaattacctaaaaatattcctatttcttgtaacgaattattgaaagcaatgcttgtccattctgataactatgccgcccacgcgctttctcgtgcagcgggaataagtcgtcgccaatttattaagaaaatgaacgaaaaagcccatcaacttggtatgtattctactcgttttcacgatagttcaggattatctagctataatatttccagcccaatggatttagttaagctcgccaaatattcattaaataaatcggacattaaacgtttatctaatcttagtgcaacttatatccaagcagggaaacaaaaactttatattaaaaataccaataagttagtgcgtgatgaaatttttgatgcggcagtgaataaaacaggctacattcaagaatctggttataatctcgttttcattaataaacaccgatgcaaaaatgcaactattggcgtaattagtttaaataacacttcctcagcgtatcgttctagttttactaaaagcaaattagaaaaattcggctgcacggcattaaatggaagaacaattcgtgatgtagcaggagaagcccaatatgaagatggctatgatgaagtgggatttaatacgctaattcagaaattatcaaaataatgttcataaacataaaaatgcgagataacagtttgttttatctcgcattttttagctgatgagcaggctgttctacagtgactttttcttggtcagttgttttggtttgttctgtcattttaggtttatcatcacaagcagccaagactattgctgaacttaatactaaccaaaatgttttgttcttttttcatacattcaatacattttgtacgaaataattataaataaatctattattttgataatcattcccattccaaaacaatataaaaagtagtactattatctccgatgaataattgttgagctattgaacaattattcaggcattcaatctatcttttttaaataaggacatcttatgcgaaattcattcaaaattatgaccgcacttgcacttggtttatttgcaatgcaagctaatgcaaaattcaaagttgttaccaccttcaccgtgattcaagatattgcgcaaaatgtggcaggcaatgcggcaacagtggaatctattaccaaaccaggtgctgaaattcacgaatatgaaccaacgccaaaagacattgtaaaagcacaatctgctgatttaattttatggaacggcttaaatttagaacgttggtttgagcgtttcttccaaaatgttaaagataaacctgctgtggtagtaacagaaggtattcaaccattatctatttatgaaggcccgtataaagatgcgcctaatccacacgcttggatgtcgccatctaatgctttaatttatattgaaaatattaagaatgcgttagtgaaatacgatccacaaaatgcagctgtgtatgaaaaaaatgccgctgactatgctcaaaaaattaaacaacttgatgaaccgcttcgtgcaaaattagcacaaattccagaagcgcaacgctggcttgtaacaagtgaaggtgctttcagttatttggcgaaagattacaacttaaaagaaggttatttatggccaatcaatgctgaacaacaaggcacaccacaacaagtgcgtaaagtgattgatttagttcgtaaaaacaatattccagttgtgtttag

SEQ ID NO: 258 - DNA, 20 bp, ARTIFICIAL
  Primer
tctaatgctggcacaacacc

SEQ ID NO: 259 - DNA, 20 bp, ARTIFICIAL
  Primer
tggtgtgccttgttgttcag

SEQ ID NO: 260 - DNA, 20 bp, ARTIFICIAL
  Primer
tgcgttggcacagtcttatg

SEQ ID NO: 261 - DNA, 20 bp, ARTIFICIAL
  Primer
ggcttctcctgctacatcac

SEQ ID NO: 262 - DNA, 3075 bp, ARTIFICIAL
  Sequence of the pbp2 coding sequence and flanking regions.
gtatccattggtgatgttcttgcgaataatgtcgccacagttattggcagtgttattatgggcagcatagtaaaaataatttcaatttagacataaaaagcgcggttaatttcgcgcttattttttgcgtggattttgcgcaagagggtattcaatgatagaattccgcacctttattgctaagtgagaacaaaatggcgttagttgaatttttgatggaaaccttagatgggttaaagggaacagatattgtacattttgatgtacgtggaaaatcctcgattacggataatatgattatttgcacggggacgtcgagtcgccaagtttctgcaatggcagataatttaattacagaatgtaaaaaagcaggttttgaaacctttggcgaagaaggtaaaaatactgcagattggattgtggtggatcttggtcaagctatcgtacatatcatgcaacgtgacgcccgtgaaatgtatcaattagagaaactttgggcgtaaattttagtaaagtgcggtaaaaaataaccgcactttttagataaggatgacttgtgaaaatcacgttaattgccgtcggaacaaaaatgccttcttgggttacaacgggttttgaggaatatcaacgccgtttcccaaaagatatgccttttgaactaattgaaatcccagcaggcaagcgtggaaaaaatgctgatattaaacgcattttagaacaagaaggtaaagcgatgttagcggcctgtggaaaaggcaaagtcgtgacgttagatattcctggtaaaccttggacgacgccgcagctagctgagcaactagaagcgtggaaaaatgatggtcgcgatgtttgtttattgattggtgggcctgaggggctttcgccagaatgcaaagctgctgcagagcaaagttggtcgctttctcccttgacattacctcacccgcttgttcgtgtcgtggtggctgaaagtttgtatcgtgcgtggtcgctaaccactaatcatccttatcatcgagaataatacatccttattttagtcagatgaatttaaaaaaattcttcaatacaccaacgcacgaaccgttccgcgataaaaaagcggagcgtaacctttttgcacgccgaacgttagtggcttttttggggattctgctcttaacaggcgtgttattcaccaatatttatcagctacagattgttaatttcgatacttaccaaacgcgttctaatggtaaccgaattaaattattacctttaccgccaacacgtggcttaatctatgatcgttacggcaaattattagccgaaaatcttactttttttggtttatacattgtgccagaaaaaactgaaaatttagaccgcactttagatgaattacgctatattgtgggattgacggataacgatattgaaaattttaaaaaggaacgtcgccgcggaacgcgttatacaccgattttattaaagccgaatttaacagaagaacaaatttcacgctttgcggtaaatggctaccaatacccgagcttagaggtacgtccttatttcaaacgccattatttatatggcgaaacaatggcgcatattttgggctatgtaggtaaaatgaatgataaagatgtagaacgtttgaaacgagaggataaattcgcgaattatgcgggaacgaacgatattggaaaattgggtattgaacgttattacgaggatatactgcaaggtaccacgggttttgaagaagtagaaattaataatcgcggcaaagtaatccgcactttgcgtagccgacctgctgtggcgggaaaaagtattcatttaaccattgatttggcattacagcgttatattactgaacttttatcgggactaaaaggtgctgtagttgtgcttgatccgaaagatagtagtgtattagcgatggtatctacaccaagttatgataataatttatttgttgatggtatttcctccgaagattataaacgtttattaaatgatcttgctcgtccactttatagtcgtgcgacacaaggtgcgtatccgcccgcttcgacagtcaaaccttttattgcagtagccgcacaaactgaaaatgtgattacaccaaacacaacgatttttgatccgggatattgggtattacctaattccacaaaacgttttcgtgattggaaaaaaacaggccacggggatacggatttgaataaagcgattactgaatcctctgatacttatttttatcaagtggcttataatatgggtattgatcgcctttctaattggatgaaggattttggttttggtatgccaacggggattgaaattcaagaagaaacggctgccaatataccaactcgagaatggaaacaaaaacgttataaacgcccttgggtgcaaggcgatacgatttcggttgggattggtcaaggttattggacggcaacaccactacaagtagcaaaagcgacgacaatattggtcaataatggcaaagtaaatacaccgcatttgatgaaagcaattgaaggtgcagtattagagccttatgaagatccgttactttatcctgatattaatacacctaaagtggcagcttgggaggcagcgaaacgcggtatgtacaatgttgttaatgctgcaaatggaactgggcgaaaagcctttgcagatgcaaattatcgtgttgcagggaaatctggcactgcacaagtgtttagtttaaaggaaaatgaaaaatataatacggcaggcttaaaaaaagaattgcatgatcacgcttggtttaccgcttacgccccttatgataatcctaaattagttgtaacagtgattttagaaaatgcaggtggtggttcaagtaatgccgcacccttagcacgtaaagtgatggattactatttaaatcagcgtttaccacaagttgaaaaatataatgtacctattcagcaaaaaaaagatttgtcacaagagagcgaacaaataaatggaagataaaatccctttttggttgcgtgtttggcaacgtttgcatattgatttttggctgtttatcggacttcttgcaataac

SEQ ID NO: 263 - DNA, 20 bp, ARTIFICIAL
  Primer
tgatggaaaccttagatggg

SEQ ID NO: 264 - DNA, 20 bp, ARTIFICIAL
  Primer
gcattacttgaaccaccacc

SEQ ID NO: 265 - DNA, 20 bp, ARTIFICIAL
  Primer
aatacaccaacgcacgaacc

SEQ ID NO: 266 - DNA, 20 bp, ARTIFICIAL
  Primer
tggtaccttgcagtatatcc

SEQ ID NO: 267 - DNA, 2850 bp, ARTIFICIAL
  Sequence of the ponA coding sequence and flanking regions.
cattaaattaatagcaagcaagataaataaagcgatataaaaagctaaacgacgtaaacgcttttgatgttgataagtacgccaaggcaataaattcatcgacatttaaccacccactttttgttgatgtaaatctttttgccatagcgcgttgcccagcgcaataaaagggagttctgtttctactcgctgccagttttcgggtaatggtgtatgacttgagggaatttgataaacaaaaacttgttcaagttgtccttcaaaacgttcggtaaattgttcataaagtgcggtcaaattttcgtgagattgtaaaatttgtgattgctgagatctttcacaaatcgccaagcaatagtcatcttcttgaaataaaaataaggtattttctgaccgcacttgttcattcaacagatattgaaatgcacgcaaaacagcatttgacgcaacatccaatatattaatattaaatggctgaaaatcttgcaaataagtttgagcgctacttttacgaattgcagtaacctctaatcgaaaaccttgctttaacggggtagaacgataatcaaaccacaattcttctaaaaaaataggcagctctttttcaatcacaaatttacattgttgatgacattcttgcgcatttaacacttgtggcaacattaatactttcgaccaagttaagtgggcgggaatgcttgctacaaactgcaaaggaaaggttttcccttgatattgtgtttttagctgttgtaaaaaacgatttttaaaataacgatcattaacaaagatttgataactttgtggctgttcgagatcatcaaaccacacaaaatcaaaataactctgcttacgatgaatgccgatttgtaaagtgcggtaatttttcagggagaattgcatattctttcctattctttaaaggctgaatcttttatacttaacagccaaatcataggtctcttgacaagaatattcattaacgaagcgagaattttacgatgcggatcgcaaaattaatattaaacaccctattaactttatgtattttaggtttagtagcaggcggaatgttgtatttccacttaaaatctgaattgccctcagtagaaacattaaaaaccgttgaattacagcaaccaatgcagatttatacggctgacggtaaattaattggcgaagtgggtgagcaacgccgtattccagtgaaattagccgatgtgccacaacgcttaattgacgcatttttagcgacggaagacagtcgtttttacgatcatcacggattagaccctatcggcattgcccgtgcattgtttgtcgcagtgagtaatggcggtgcatcacaaggcgcaagtacgattactcaacaattagcgcgtaactttttcttaacctcagaaaaaaccattattcgtaaagctcgtgaagccgtgcttgcggtagaaatcgaaaatactctcaacaaacaagaaatattagagctttatttaaacaaaatctttttaggctatcgttcttatggtgttgcagcggcagcacaaacctatttcggtaaatcattgaatgaattgaccttatcggaaatggcgattattgctggtttacctaaagcaccttcaacaatgaacccgctttattctttaaaacgttcagaagaacgccgcaatgtggtgctaagccgtatgttagatgaaaaatacatcagcaaagaagaatatgatgctgcattgaaagagccgattgtggcgagctatcacggcgcaaaatttgaatttcgagccgattatgtcactgaaatggtgcgtcaagaaatggtgcgtcgttttggcgaagaaaatgcttacaccagtggttataaagtatttaccactgtactttcaaaagaccaagctgaagcccaaaaagctgtgcgtaataacttgattgattacgatatgcgtcacggttatcgcggtggcgcgccattatggcaaaaaaatgaagccgcttgggacaatgatcgcattgtcggttttctacgcaaactacctgattcagagccatttattcctgcggcagtgattggaattgtaaaaggcggtgctgatatattgctcgcttctggggaaaaaatgaccttatcaaccaatgcaatgcgttggacaggcagaagcaatcctgtgaaagtcggcgagcaaatttggattcatcagcgtgctaatggggaatggcaattaggacaaattcccgcagcaaattcagcattagtttctcttaattcagataatggtgcgattgaagcagtggtcggtggctttagctatgaacaaagtaaattcaatcgagccacacagtctttagttcaagtgggttcttctatcaaaccatttatttacgcggcagcattagaaaaaggcttaacactttcaagcgtattacaagacagcccgatttctattcaaaaaccgggacaaaaaatgtggcaaccgaaaaactcgcctgatcgttatgatggcccgatgcgtttacgcgtaggattaggtcaatccaaaaatataattgctattcgtgctatccaaacggcaggtattgatttcacagcagaatttttacaacgttttggttttaaacgtgatcaatattttgccagtgaagccttagcacttggcgcagcctctttcacaccattagaaatggcgcgagcttatgcggtgtttgataatggtggcttcctcattgaaccttatatcattgaaaaaattcaagataacacgggtaaagacttatttattgcaaaccctaaaattgcttgcattgaatgtaatgatatacctgtaatttatggcgaaaccaaagacaaaatcaacg

SEQ ID NO: 268 - DNA, 20 bp, ARTIFICIAL
  Primer
ttctgtttctactcgctgcc

SEQ ID NO: 269 - DNA, 20 bp, ARTIFICIAL
  Primer
aggctgcgccaagtgctaag

SEQ ID NO: 270 - DNA, 20 bp, ARTIFICIAL
  Primer
ttaggtttagtagcaggcgg

SEQ ID NO: 271 - DNA, 20 bp, ARTIFICIAL
  Primer
cgtgatagctcgccacaatc

SEQ ID NO: 272 - DNA, 2775 bp, ARTIFICIAL
  Sequence of the ponB coding sequence and flanking regions.
tgtatatcacagggggtggttgcagcggtttccaatatggttttacctttgatgaaaaagtcaatgacggcgatttaaccattgaaaaatcaggggttcaacttgtgattgacccgatgagcttacaatatttaatcggcggtacagtcgattacacagaaggtttagagggttcacgttttactgtaaataatccaaatgctaccagcacttgtggctgtggttcatcctttagtatctaagatggattttcaatttacacattatcaaggcaatgtatccgtcaaatgttcgatggaacacattgcccttgctaactggttcaacacagaagtgcggtcaaattcagacaagattttaaccgcactttctactgcaaaatcacttattgaaaatcaagaaaaagtcttaattggcacggaatatacgttatttttaaatgctgatgaagtaatggtgcgagccaacaatctcgccattgaatcagatgaaattttagaacaagatttccattattatgacgaagaaagccttgctttttgcggtacgcaagattttattcattttctccaatcttatgttgattttattgcttaactcactatgacttctcaacactccgctaaaaaatcatcgaaaaacacgccaaaaaataaccgcacttttaaaggttttttacttaaatttagcttcactgcacttgtcttaacgattttttacggcggttatctcgattggcaaattcgttctaaaatggacggtcaaatttggcatttgcctgcggaagtttatagtcgattagaaagtgtgaaaattgccgataatctcgcttttgatgaagtcattcaaattttattagataacgaatatcgccaaacgaccatggttgccgcccctggcgatttcaaattagaagatgatagcattgtagtgcttcgccgcgcttttcctttccccgataaagcagagcctcagcgagttttgcgcttgcgttttagccataataagttatctcgcattgaagatttagtgacggtcaaaactgttgatgaatttcgtcttgcaccaaagttgattgcgatgttgcaatcagacaacgaagatcgccttgctattcctttacaaaattatccccgtttattaattgatacattaattttaacggaagatcgccgcttttatgaacataatggcattaatccagtggggattttacgtgcattaattgcgaatattcgtgctggtcaaacggtacagggcggaagtacgctcactcaacaattagtcaaaaatttatttttatcgcgcgaacgcaccattacacgcaaagccaacgaagccttgatgtcattggttttagattggcgttacgataaaaaccgaattctcgaaacctatctcaatgaaatttatctcgggcaaaatggcgatacgcaaattcacggttttgaattagccagccaattttattttggtcgttcgattcgtgaaattagcttagatcaaattgcccttttagtggggatggtcaaaggcccttcactttataatccgtggcgtaatccacaaaacgcactcgaacgtcgcaacattgttttaaggctaatgcttgaacataaaatgatcggcgatgaactttatcaattattaagtcagcgacctttaggtgtgcaaaagaaagggcaaatctcgcgtaaataccctgcatttattcaaactttacaagcagatttacgccgtaagctgggcgaacacaaaatatcgagcttacttggcgcacgtattttttccacaatggatttaaaacaacaagctcaagcagaaaatgcagtgggcaataccgtttcgcaattacaactgaaaatgaaaaatccccatttagagggagcgatgattataacggattatcgcacaggcgaaattcgtgcagtagttggcggtttacaaacgcaatatgcaggctttaatcgtgcattaatggcaaaacgtcagattggttctttagtaaaaccttctatttatttgaccgcactttctaacccagaacagttccgtttgaataccccaattaataaccaaccaataacaattaatgtcaaaggtagcccgccgtggcagccacgcaactatgacaaaaaatatagtgattctgtaatgttaatggatgccttagcccgttctttaaatattcccactgtaaatattggtatgaaagttggcttgagcaaagtcattgacacgcaaaaagcgatgggctgggacaacgtggaaattcctaaagtgcctgcgatgttgctcggttcttataccatctcgccttatgatgtcacaaaactttatcaaacccttgccaatcaaggtgggagaattgcgcttacaaccgtcgatagtattgcagatcgtcaaggtaacctaatttttcaacacgataaaagtgcaaaacaagtggtgccacaagaagcggcattccaaaccttatttgcaatgcaacaaactgttgaacgtggtacagctcgcagtttgcaaaaggattacgctgatttacatttagcaggcaaaacaggcacaaccaatgaatcacgcgatacgtggtttgtgggaattgacggaaaaaatatcagcaccgtctggcttggtcgcgatgataatggcgaaacaaaactgactggtgcttctggcgcattgcaaatttataaagattatttaaaccgtacaaatattgaaaaattagcaattactccccctacaacagtgaaatgggtggggataaatcaa

SEQ ID NO: 273 - DNA, 20 bp, ARTIFICIAL
  Primer
cggtacagtcgattacacag

SEQ ID NO: 274 - DNA, 20 bp, ARTIFICIAL
  Primer
cgtatcgcgtgattcattgg

SEQ ID NO: 275 - DNA, 20 bp, ARTIFICIAL
  Primer
gaagatcgccttgctattcc

SEQ ID NO: 276 - DNA, 20 bp, ARTIFICIAL
  Primer
tacgtgcgccaagtaagctc

SEQ ID NO: 277 - DNA, 3000 bp, ARTIFICIAL
  Sequence of the slt coding sequence and flanking regions.
aatacattgaattttggttgggcaatattctttattatttgtatgttggtaaatatttatatcagccataatatgtcggaagaggcttgggttgatttcaaatctttcggaattattggtatgacagtgattgcaaccattatttcgggagtttatatttatcgttatttgcctaaagatggctcaaattcaaaagacggagagaaataatgtctgccaattttactgataaaaatggtcgccaatcaaaaggagttcttttactacgaactttggcgatgccttctgacaccaatgctaacggagatatttttggtggctggattatgtctcaaatggatatgggcggcgcgattttagcgaaagaaatcgcacacggacgcgtggttactgtcgccgttgaaagtatgaattttatcaaaccaatctctgtgggcgatgtggtttgttgctacggtcaatgtctcaaagttgggcgttcttccattaaaattaaagtagaagtatgggtaaaaaaagtggcgagtgagccaattggcgaacgttattgtgtcaccgatgcggtatttacttttgttgcagttgataataatggtcgctctcgcacgattccccgtgaaaataaccaagagttagaaaaagcattagccttaatttcagaacaacccttgtaaataaaaggaaatcattatgtactatgttatttttgcccaagatattcccaatacgttagaaaagcgtcttgccgtacgcgagcaacacttggctcgtttaaaacaacttcaagcggaaaatcgcttactgacagcaggcccaaatcctgcaattgatgatgaaaatccgagtgaagctggttttacaggttcaaccgttattgctcaatttgaaaatctacaagcggcaaaagactgggctgcacaagatccttatgtagaagctggcgtatatgcggatgttattgtaaagccgtttaaaaaagtcttttaatttaaataacgtaatatgaaaaaagtcgccttaatttctctctgtatttttaccgcactttctgcttttgccgattcgcctaatacggcaacagcatcaatcaatcttgagcaagagaaacaaaactgggagctggcgcagcatcaagattatttaaaacgtctaaaacaacgtgaagtctttttgcaagttgaaggtttgctaaaaagtgcggtaaaaaaacagcaattttctgaagcgactcaaaatatcacaaaaaccttaatagactcattgcaaggctaccctttgcaatatgatctgcttgctcgattttgggagacaaaaatcgcctttttgcagaatgatgatattcaaggaagacaacaagcaataaatgaactcaatgcgttagtgcaacaaaattacccttttgtgacgccagcatttcaagccttattacaaaaactatccacgttaaacgaacaacaaacatcagcaacttcagataatgctaaagaaaataacagggttcaaaaagagcaaaatcaagtagaaaatcctaaacaacttgctgaaattgtaagaaaaagtgatcctaacactttagataaaaccgtattaattgatgctttcccacgttatcttaaaacgctacctgaacaaatgaataacctaagttttgaatcctatcaaaaatgggcaaatacttggcaactctcagaagatgaaattaaacagtggaaaatagcctttttaaatcgtttttttgataatgaaaacactgattttcaaaaatggcgtgatgaacaaatccgacaattacagactgataatttaaccgaacgccgtttacgaatggcaatttggcaaaaaactgaattaacctcttggctaaatttgctttctgccgaatcaaaaagtaagcaagaatggcgttattgggaagctaaacaagatatattaaaaaataccaaaaaactgaccgcactttcaaaagagcgtggcttttatccaatgttagcggctacacaattaaaacaagcatatcaactgaatgtccctattgcgccaagttttactcaagctgaacaacttccttttaagcaagtttttgcaatgattacagaattaagagaacttggacgaaatggtttagcaaaacaacgctggcgaattttacttgataatgttgatttcacaactcagctaaaactttctgaatatgccaaaaatcagcaatggtttgaattagctgttgatgcttctattgttgcaaaagcgtgggattacctgtctcttcgtctgccaaatgcttattctgaatacttcaatgctgcattacagaatttgaatatcagcaaaacttttgctatggcaatcgctcgtcaagaaagtgcttggaatccaatggcacaatcttcagcaaatgctcgaggcttaatgcagcttttgccaagtacggcaaaattgactgcagagaataatcaactaccttatcaaggcgaacaagatttattcaaaccattgaataatattttgctaggtaccgcacatcttaatgaactcaatggaaaatatcctaataatcgaatattgattgcagccgcttataatgcaggggcaaatcgagtaggaaaatggttaagtcgtgcgagtggaaaattagcattagatgaatttgttgcatctattcctttttatgaaactcgtggttatgtgcaaaatgtagtcgcttatgatttttactatcaaattttgcaaaataaagaaaacccacaaatctttagccaagaagaattgaatcggctatactaaatgcactagtttaatagtgtaaaatgggagcataattatgtatatcagccgtaatttagagcaatggaatgcatttcttcaaatgctaaaaattgcctttgaagaaaacaaagcgcaggaatttctaaccttattattaactgcagacgaacgagatgctgtaggattacgcttgcagattgtctctcagctgattgataaaaatatgcctcagcg

SEQ ID NO: 278 - DNA, 20 bp, ARTIFICIAL
  Primer
atatgtcggaagaggcttgg

SEQ ID NO: 279 - DNA, 20 bp, ARTIFICIAL
  Primer
gcgtaatcctacagcatctc

SEQ ID NO: 280 - DNA, 20 bp, ARTIFICIAL
  Primer
cctaatacggcaacagcatc

SEQ ID NO: 281 - DNA, 20 bp, ARTIFICIAL
  Primer
gtcggatttgttcatcacgc

SEQ ID NO: 282 - protein, 357 aa, HAEMOPHILUS INFLUENZAE
MAGNTIGQLFRVTTFGESHGIALGCIVDGVPPNLELSEKDIQPDLDRRKPGTSRYTTPRREDDEVQILSGVFEGKTTGTSIGMIIKNGDQRSQDYGDIKDRFRPGHADFTYQQKYGIRDYRGGGRSSARETAMRVAAGAIAKKYLREHFGIEVRGFLSQIGNIKIAPQKVGQIDWEKVNSNPFFCPDESAVEKFDELIRELKKEGDSIGAKLTVIAENVPVGLGEPVFDRLDADLAHALMGINAVKGVEIGDGFAVVEQRGSEHRDEMTPNGFESNHAGGILGGISSGQPIIATIALKPTSSITIPGRSINLNGEAVEVVTKGRHDPCVGIRAVPIAEAMVAIVLLDHLLRFKAQCK

SEQ ID NO: 283 - protein, 156 aa, HAEMOPHILUS INFLUENZAE
MTSVIYPGTFDPITNGHLDIIERSAVIFPRVLVAVANSPSKKPLFSLEERVELVRQSVVHLSNVEVFGFSDLLANVIKQHNISAIIRGVRTTTDFEYELQLAALNRLLTKGVDSLFFPPAEKWAFVSSTIVREIYLHGGDVAELVPVPVFNALKAR

SEQ ID NO: 284 - protein, 418 aa, HAEMOPHILUS INFLUENZAE
MIFMQQDYLSQQRFSALPLHPIVRGALAKKGFDFCTPIQALSLPISLNGRDVAGQAQTGTGKTMAFLTATFHHLLTHQDPNLKYPHPRALILAPTRELAVQISNDAEFLAKASGLKTALAYGGDGYDKQLQAIERGVDILIGTTGRVIDYVKQGVIGLDEIQVVVLDEADRMFDLGFIRDIRYLLRKCPAPQARLTMLFSATLSYKVRELAFEDMNEPEYIEIEPEQKTGHRIKEELFYPSNQDKMALLLTLMEDEWPERCIVFANTKHRCEEIWGYLAADGHRVGLLTGDVAQKKRLSLLKQFTDGDLDILVATDVAARGLHISDVTHVFNYDLPDDREDYVHRIGRTGRAGESGVSISFACEEYAMNLPAIEEYIGHSIPVSQYETEALLELPKPYRLKRAVPPQGHTRHRSYHAK

SEQ ID NO: 285 - protein, 215 aa, HAEMOPHILUS INFLUENZAE
MNQSILSPFGNTAEERVLNAINAFKNGTGVLVLDDEDRENEGDLIFPAETITPEQMAKLIRYGSGIVCLCITDERCQQLDLPPMVEHNNSVNKTAFTVTIEAAKGVSTGVSAADRVTTIQTAIADNAVLTDLHRPGHVFPLRAANGGVLTRRGHTEASVDLARLAGFKEAGVICEITNDDGTMARAPEIVEFAKKFGYSVLTIEDLVEYRLAHNI

SEQ ID NO: 286 - protein, 308 aa, HAEMOPHILUS INFLUENZAE
MQLIRGLHNANRVLQGCALTIGNFDGVHLGHQTVLRHLRQKADELNLPMAVLLFESQPREYFMGKNAPARLMRLRDKIYYLEKAKVDVVIVAKFDRTFAEQLADVFIEQTLVNHLHVKFLSIGDDFKFGSKRQGNFAMLQAASKRFGFIVEDNRSFCLDAQRISSTAIREALANDDLQLAENLLGKPYRIFGRVIHGNKLGRTIGFPTANIRLHRQVNPIKGVYAVKVRLKSGEIFNGVANMGKRPTINGLMQLLEVHLFDFSQNIYGQMVEVEFCHKIRNEIKFPSFDDLKVQIEKDVETAKAFFNS

SEQ ID NO: 287 - protein, 144 aa, HAEMOPHILUS INFLUENZAE
MIALIQRVSQAKVDVKGETIGKIGKGLLVLLGVEKEDNREKADKLAEKVLNYRIFSDENDKMNLNVQQAQGELLIVSQFTLAADTQKGLRPSFSKGASPALANELYEYFIQKCAEKLPVSTGQFAADMQVSLTNDGPVTFWLNV

SEQ ID NO: 288 - protein, 390 aa, HAEMOPHILUS INFLUENZAE
MCNNEAKMSELLSVQSDAPAKKINLMDLTRQQMREFFKELGEKPFRADQLVKWIYHFGEDNFDNMTNINKKLREKLKAVAEIKAPEVAVEQRSADGTIKWAMQVGEQQVETVYIPEADRATLCVSSQVGCALACTFCSTAQQGFNRNLTVSEIIGQVWRASKIIGNFGVTGVRPITNVVMMGMGEPLLNVANVVPAMEIMLDDFAYGLSKRRVTLSTSGVVPALDNLSKMIDVALAISLHAPNDELRDEIVPINKKYNIKTLIDSVNRYLNVSNANHGKVTIEYVMLDHVNDGVEHAHQLAEVLKNTPCKINLIPWNPFPEAPYAKSSNTRIDRFQKTLMEYDFTVIIRKTRGDDIDAACGQLAGDVIDRTKRTAMKRQFGQNIGVTEVN

SEQ ID NO: 289 - protein, 183 aa, HAEMOPHILUS INFLUENZAE
MNREQIADALRQNQVVAYPTEAVFGLGCNPQSESAVKKLLDLKQRPVEKGLILVAPSLDFFRPFVDFEQINDEQLSRLQGKYERPTTWIVPAKSTTPHFLTGKFDSIAIRLCDHPSVKALCELTGFALTSTSANLTGEPPCRTADEVRLQFGSDFPVLNEMVGRAHNPSEIRDLRTNQLFRQG

SEQ ID NO: 290 - protein, 267 aa, HAEMOPHILUS INFLUENZAE
MNPMLNIAIRAARKAGNVIAKNYERRDAIESTQKGINDYVTNVDKASEAEIIEVIRKSYPDHTIITEETGAIEGKDSDVQWIIDPLDGTRNFMTGLPHFSVSIAVRVKNRTEVGVVYDPIRNELFTAVRGEGAKLNEVRLRVDSKREIQGSILATGFPFKQPKLMPAQFAMMNALIEDAADFRRTGSAALDLCYVASNRIDGYFEMGLKAWDCAAGDLIVREAGGLVCDFDAGNSYLRSGNIIAAPSRVIKEMLNKIRPCLGAEFNH

SEQ ID NO: 291 - protein, 289 aa, HAEMOPHILUS INFLUENZAE
MGKLMEIIIISGRSGAGKSVALRALEDAGYYCVDNIPLDLLPQLTDILSQSQSSVAISLDIRNIPNSAHSLKQTLSTLQKHHQIKIIFLEADRATLIRRYSDSRRLHPLSLKDLSLEAAIDEEYRYLEPLIQHANLILDTTHLSTHSLAERLREFLRGNSEKELKIIVESFGFKYGIPLDADYVFDVRFLPNPHWDPTLRPMTGLEAPVAEFLNSHTEVNEFIYLTRHYIDTWLPMLEKNNRSYLTIAIGCTGGKHRSVYIAQQLGEYFQAKGKTVKIQHKSLERNKKI

SEQ ID NO: 292 - protein, 188 aa, HAEMOPHILUS INFLUENZAE
MATYTTSDFKPGLKFMQDGEPCVIVENEFVKPGKGQAFTRTRIRKLISGKVLDVNFKSGTSVEAADVMDLNLTYSYKDDAFWYFMHPETFEQYSADAKAVGDAEKWLLDQADCIVTLWNGAPITVTPPNFVELEIVDTDPGLKGDTAGTGGKPATLSTGAVVKVPLFVQIGEVIRVDTRSGEYVSRVK

SEQ ID NO: 293 - protein, 359 aa, HAEMOPHILUS INFLUENZAE
MAKLLDIVKPGVVTGEDVQKVFAYAKEHNFAIPAVNCVGSDSVNAVLETAARVKAPVIIQFSNGGAAFYAGKGIKPTSGTRPDVLGAIAGAKQVHTLAKEYGVPVILHTDHAAKKLLPWIDGLLDAGEKHFAETGRPLFSSHMIDLSEESMEENMAICREYLARMDKMGMTLEIEIGITGGEEDGVDNSDVDESRLYTQPSDVLYVYDQLHPVSPNFTVAAAFGNVHGVYKPGNVKLKPSILGESQEFVSKERNLPAKPINFVFHGGSGSSREEIREAIGYGAIKMNIDTDTQWASWNGILNFYKANEAYLQGQLGNPEGPDAPNKKYYDPRVWLRKMEESMSKRLEQSFEDLNCVDVL

SEQ ID NO: 294 - protein, 318 aa, HAEMOPHILUS INFLUENZAE
MKSLNIIFAGTPDFAAQHLQAILNSQHNVIAVYTQPDKPAGRGKKLQASPVKQLAEQNNIPVYQPKSLRKEEAQSELKALNADVMVVVAYGLILPKAVLDAPRLGCLNVHGSILPRWRGAAPIQRSIWAGDVQTGVTIMQMDEGLDTGDMLHKVYCDILPTETSTSLYNKLAELAPSALIDVLDNLENGKFIAEKQDGSQSNYAEKLSKEEAQLNWSLSAMQLERNIRAFNPWPIAYFSTEDKDGNAHTLKVYQAKVLPHQDKPAGTILSADKNGIQIATVDGVLNLLQLQSAGKKPMSAQDLLNGRAEWFTIGKVLA

SEQ ID NO: 295 - protein, 84 aa, HAEMOPHILUS INFLUENZAE
MRIKNRLFLEDTMAKEDCIEMQGTILETLPNTMFRVELENGHVVTAHISGKMRKNYIRILTGDKVTVEMTPYDLSKGRIIFRSR

SEQ ID NO: 296 - protein, 829 aa, HAEMOPHILUS INFLUENZAE
MTEDVKADAPKKLSIQRRTKTTVSSTTTGGKSKEVQVEVRKKRTVKTDIAQQEEAKLKAQQEAEAKKIAEQKAAEEKARLEAEKAKAETAKPVKSAVDSKAKSVESEKEKRKAGEAELRRKAEELARQKAEEQARRAVEEAKRYAEADDSDNESSSEDYSDYNLSSRYALEAEDEEDRRNENRGRGKNKVAKAKKGGRDDENSKNSKNERESNRKNQKDAKFGKGKNGKKGAALQQAFTKPAQVVKSDVVIGETITVAELANKMAVKATEIIKMMMKMGEMVTINQVIDQETAQLVAEELGHKVILRNENELEEAVLGDRDVNAEKVTRAPVVTIMGHVDHGKTSLLDYIRKAKVAAGEAGGITQHIGAYHVEMDDGKMITFLDTPGHAAFTSMRARGAKATDIVVLVVAADDGVMPQTIEAIQHAKAAGAPLVVAVNKIDKPEANLDRVEQELLQHDVISEKFGGDVQFVPVSAKKGTGVDDLLDAILLQSEVLELTAVKDGMASGVVIESYLDKGRGPVATILVQSGTLRKGDIVLCGFEYGRVRAMRDENGKEVDEAGPSIPVELLGLSGVPAAGDEATVVRDEKKAREVALYRQGKFREVKLARQQKAKLENMFSNMSEGDVAELNVIVKADVQGSVEAIVQALNELSTNEVKVKVVGSGVGGITETDATLATASNAIIVGFNVRADATARRVIEAENIDLRYYSIIYELLNEIKAAMSGMLEPEFKQEIIGLAEVRDVFRHPKFGAIAGCMVTEGVVKRNNPIRVLRDNVVIFEGELESLRRFKDDVSEVRNGMECGIGVKNYNDVKVGDQIEVFEVVEVKRSI

SEQ ID NO: 297 - protein, 135 aa, HAEMOPHILUS INFLUENZAE
MAEQAELDLVEISPNAEPPVCRIMNYGKFLYEKSKTAKEQKKKQKVVQVKEIKFRPGTDEGDYQVKLRSLIRFLEDGDKAKITVRFRGREMAHQDIGLDVLERVKNDLAEISVVESAPGKLEGRQAVMVLAPKKK

SEQ ID NO: 298 - protein, 295 aa, HAEMOPHILUS INFLUENZAE
MGHFSEELQQVQTRINRFLEAQFEGIESHNAPLLEAMKYALLLGGKRVRPFLVYATGQMLGAEKQTLDYAAAAIEAIHAYSLIHDDLPAMDDDNLRRGHPTCHIQFDEATAILAGDALQSFAFEILTKTPNISTEQKLALIQILAQGAGVQGMCLGQSLDLISEHKQISLSELELIHRNKTGALLIAALKLGFICSPHFTDKRLEQSLTQYAEAIGLAFQVQDDILDIEGDSAEIGKQVGADLDLDKSTYPKLLGLSGAKQKAQDLYQSALSELEKIPFDTTVRALAEFIITRKS

SEQ ID NO: 299 - protein, 329 aa, HAEMOPHILUS INFLUENZAE
MKKQDLMSIDEIQKLADPDMQKVNQNILAQLNSDVPLIGQLGFYIVQGGGKRIRPLIAVLAARSLGFEGSNSITCATFVEFIHTASLLHDDVVDESDMRRGRATANAEFGNAASVLVGDFIYTRAFQLVAQLESLKILSIMADATNVLAEGEVQQLMNVNDPETSEANYMRVIYSKTARLFEVAGQAAAIVAGGTEAQEKALQDYGRYLGTAFQLVDDVLDYSANTQALGKNVGDDLAEGKPTLPLLHAMRHGNAQQAALIREAIEQGGKREAIDEVLAIMTEHKSLDYAMNRAKEEAQKAVDAIEILPESEYKQALISLAYLSVDRNY

SEQ ID NO: 300 - protein, 495 aa, HAEMOPHILUS INFLUENZAE
MSKEILLAAEAVSNEKLLPREKIFEALESAIAISTKKKFEYETDIRVSINPKTGEFDTFRRWLVVDEVKVPTKEITLEAAQFDDPNLQLGEYVEDQIESIAFDRIAMQTARQVISTKIREAERAKVVEQFREEEGKIVTGTVKKVSRDSIILDLGNKAEAMIAREDMLPRENFRPGDRVRGVLYKVNPEGKTAQLFVTRSKPEMLIELFRIEVPEIGEEMIEIRGAARDAGSRAKIAVKSNDKRIDPVGACVGMRGARVQVITNELGGERVDIVLWDDNPAQFVINAMAPADVSSIIVDEDNHSMDIAVEADNLAQAIGRNGQNVRLATQLTGWTLNVMTTDELNAKHQAEDNKVLNLFINALELDEEFAQILVEEGFTSLEEIAYVPMNELTAIDGLEDEDLVEELQTRAKNAITAAAVAEEEALKKANVEDRLLNLEGMNRHVAIKLAEKQITTLEELAEQGVDDLTDIEELTAEQAADLIMAARNICWFGEE

SEQ ID NO: 301 - protein, 194 aa, HAEMOPHILUS INFLUENZAE
MSEIKLIVGLGNPGDKYTDTRHNAGEWLIERLARRFNVSLNPESKFFGKTARTLVNGKEVRLLVPTTFMNLSGKAVGALASFYRIKPEEILVIHDELDLPPGTAKLKQGGGHGGHNGLKDIVAQLGNNNNFYRLRIGIGHPGHRDLVAGYVLNKPSPADRDALEKVLDEATDCVEMIFRDGMVKATNRLNSFKI

SEQ ID NO: 302 - protein, 237 aa, HAEMOPHILUS INFLUENZAE
MNITKRCKNIYVGIAVRKMPNKSAEENMKGKFIVIEGLEGAGKSSAHQSVVRVLHELGIQDVVFTREPGGTPLAEKLRHLIKHETEEPVTDKAELLMLYAARIQLVENVIKPALMQGKWVVGDRHDMSSQAYQGGGRQLDPHFMLTLKETVLGNFEPDLTIYLDIDPSVGLARARGRGELDRIEQMDLDFFHRTRARYLELVKDNPKAVVINAEQSIELVQADIESAVKNWWKSNEK

SEQ ID NO: 303 - protein, 318 aa, HAEMOPHILUS INFLUENZAE
MSDIKHAKLLILGSGPAGYTAAIYAARANLKPVLVTGLQQGGQLTTTDEIENWPGDFEMTTGSGLMQRMLQHAEKFETEIVFDHINRVDLSSRPFKLFGDVQNFTCDALIIATGASARYIGLPSEENYKGRGVSACATCDGFFYRNKPVGVIGGGNTAVEEALYLANIASTVHLIHRRDSFRAEKILIDRLYKKVEEGKIVLHTDRTLDEVLGDNMGVTGLRLANTKTGEKEELKLDGLFVAIGHSPNTEIFQGQLELNNGYIVVKSGLDGNATATSVEGVFAAGDVMDHNYRQAITSAGTGCMAALDAERYLDAQEA

SEQ ID NO: 304 - protein, 239 aa, HAEMOPHILUS INFLUENZAE
MIELDQTNIPKHVAIIMDGNGRWAKQKNKMRIFGHTNGVTAVRKAVAYARQIGVEVLTLYAFSSENWSRPEQEISALMSLFMQALDREVKKLHKNNICLKIIGDVSRFSETLQEKIKKAENLTEKNTALTLNIAANYGGCWDIIQAAKQIAEKVKKEEMSVSDINNSTFQHHLATQNAPPVDLLIRTSGEQRISNFLLWQIAYAELYFSDVLWPDFNQLEFNRAIASYQQRHRRFGGTE

SEQ ID NO: 305 - protein, 85 aa, HAEMOPHILUS INFLUENZAE
MATKKAGGSTRNGRDSEAKRLGVKRFGGESVLAGSIIVRQRGTKFHAGNNVGMGRDHTLFATADGKVKFEVKGEKSRKYVVIVTE

SEQ ID NO: 306 - protein, 598 aa, HAEMOPHILUS INFLUENZAE
MKNIRNFSIIAHIDHGKSTLSDRLIQTCGGLSDREMEAQVLDSMDLERERGITIKAQSVTLNYKAKDGETYQLNFIDTPGHVDFSYEVSRSLAACEGALLVVDAGQGVEAQTLANCYTAIEMDLEVVPILNKIDLPAADPERVAEEIEDIVGIDAMEAVRCSAKTGVGIEDVLEEIVAKIPAPEGDPNAPLQALIIDSWFDNYLGVVSLVRIKNGVLRKGDKIKVMSTGQTYNVDRLGIFTPKQEDTTVLECGEVGWVVCAIKDILGAPVGDTLTHQHNSATEVLPGFKKVKPQVYAGLFPVSSDDYEAFRDALGKLSLNDASLFYEPETSTALGFGFRCGFLGLLHMEIIQERLEREYDLDLITTAPTVIYEVEMTNGEVVYVDSPAKLPPLNNIAEIREPIAECNMLVPQEYLGNVITLCVEKRGVQTNMVYHGNQIALTYEIPMGEVVLDFFDRLKSTSRGYASLDYGFKRFQAADMVRVDIMINSERVDALALIVHKDNSQYRGRELVEKMRELIPRQQFDIAIQAAIGNHIIARSTVKQLRKNVLAKCYGGDVSRKKKLLQKQKEGKKRMKSLGNVEVPQEAFLAILHVGKDK

SEQ ID NO: 307 - protein, 360 aa, HAEMOPHILUS INFLUENZAE
MNVKPATAKISSHALKQNLEIIKQKAPNSKIIAVVKANAYGHGVVFVASTLEQNVDCFGVARLEEALALRSNGITKPILLLEGFFNEQDLPILAVNNIETVVHNHEQLDALKRANLPSPIKVWLKIDTGMHRLGVALDEVDYFYQELKKLPQIQPHLGFVSHFSRADELESDYTQLQINRFLSVTKDKQGERTIAASGGILFWPKSHLECIRPGIIMYGISPTDTIGKEFGLTPVMNLTSSLIAVRHHKQGDPVGYGGIWTSPRDTKIGVVAMGYGDGYPRDVPEGTPVYLNGRLVPIVGRVSMDMLTVDLGADSQDLVGDEVILWGKELPIETVAKFTGILSYELITKLTPRVITEYVD

SEQ ID NO: 308 - protein, 432 aa, HAEMOPHILUS INFLUENZAE
MKTKILFFLFFSTFSFSIFAAPITIAIDPGHGGKDPGAISRNLGIYEKNVTLSIAKELKALLDKDPHFRGVLTRKSDYYISVPERSEIARKFKANYLISIHADSSKSPDRRGASVWVLSNRRANDEMGQWLEDDEKRSELLGGAGKVLSHNNDKYLDQTVLDLQFGHSQRTGYVLGEHILHHFAKVTTLSRSTPQHASLGVLRSPDIPSVLVETGFLSNSEEEKKLNSQTYRRRIAYMIYEGLVAFHSGKTNTLVKDNLVQNIKQNDIKKSGKNNRTSEQNINEDNIKDSGIRHIVKKGESLGSLSNKYHVKVSDIIKLNQLKRKTLWLNESIKIPDNVEIKNKSLTIKENDFHKKQNSLVNNTNKDLKKEKNTQTNNQKNIIPLYHKVTKNQTLYAISREYNIPVNILLSLNPHLKNGKVITGQKIKLREK

SEQ ID NO: 309 - protein, 393 aa, HAEMOPHILUS INFLUENZAE
MLKRTTKIAFLSSFVALSAFSVSAEDMQFGVTPPQITAQTYVLMDYNSGAILTALNPDQRQYPASLTKMMTSYVVGVALKQGKIHNTDMVTIGESAWGRNFPDSSKMFLDLNTQVSVADLNRGVIVVSGNDATVALAEHISGNVPNFVETMNKYVQQFGLKNTNFTTPHGLDDPNQYSSARDMAIIGAHIIRDLPEEYKIYSEKNFTFNKIKQANRNGLLWDKTINVDGMKTGHTSQAGYNLVASATTSNNMRLISVVMGVPTYKGREVESKKLLQWGFANFETFKTLEAGKEISEQRVYYGDKNSVKLGALMDHFITIPKGKQSEVKARYELADKNLQAPLVKGQVIGKVVYQLDGKDIASANLQVMNDVGEAGIFGKLWDWLVLTVKGLFS

SEQ ID NO: 310 - protein, 479 aa, HAEMOPHILUS INFLUENZAE
MKKLSSISTALGSFLLSVSFSLPTFANINVSDLTQKLPEGSNVGFIAKNINQNQIIADYNGSTFMLSASTQKVFTAVAAKLALDDQFQFETALLSNGKIQNGNLDGNLIVRFTGDPDLTRGQLYSLLAELKKQGIKKINGDLVLDTSVFSSHDRGLGWIWNDLTMCFNSPPAAANIDNNCFYAELDANKNPGEIVKINVPAQFPIQVFGQVYVADSNEAPYCQLDVVVHDNNRYQVKGCLARQYKPFGLSFAVQNTDAYAAEIIQRQLRQLGIEFNGKVLLPQKPQQGQLLAKHLSKPLPDLLKKMMKKSDNQIADSLFRAVAFNYYKRPASFQLGTLAVKSILQKQGIRFGNSILADGSGLSRHNLVAPKTMLSVLEYIAKNEDKLHLMETFPIAGVDGTISGRGGLISPPLVKNVIAKTGSLKGVYNLAGFMTNARGEKVAFVQFINGYSTGDLESKTKRAPLVQFERNLYNELYKY

SEQ ID NO: 311 - protein, 306 aa, HAEMOPHILUS INFLUENZAE
MNLKQEKIAVLLGGTSAEREVSLNSGKAVLEALLKQGYNAHPIDPKEYNVANLKKDGFNRAFNILHGRGGEDGTMQGLLEQIGLPYTGCGVMASALTMDKMRTKMLWKAFGLPVADMKVVTRETFSELDPQAVVAKLGLPLMVKPSLEGSSVGLTKVKAVEELKSAVEYALKFDNTILIEEWLAGDELTVPVLDNQVLPAIRIVPEGEFYDYEAKYISDNTQYFCPAGLTPEREQALSTLVKRAYDAVGCRGWSRIDVMCDAKGNFRLVEVNTNPGMTSHSLFPKSAATVGISFEQLVVKILELSL

SEQ ID NO: 312 - protein, 610 aa, HAEMOPHILUS INFLUENZAE
MVKFNSSRKSGKSKKTIRKLTAPETVKQNKPQKVFEKCFMRGRYMLSTVLILLGLCALVARAAYVQSINADTLSNEADKRSLRKDEVLSVRGSILDRNGQLLSVSVPMSAIVADPKTMLKENSLADKERIAALAEELGMTENDLVKKIEKNSKSGYLYLARQVELSKANYIRRLKIKGIILETEHRRFYPRVEEAAHVVGYTDIDGNGIEGIEKSFNSLLVGKDGSRTVRKDKRGNIVAHISDEKKYDAQDVTLSIDEKLQSMVYREIKKAVSENNAESGTAVLVDVRTGEVLAMATAPSYNPNNRVGVKSELMRNRAITDTFEPGSTVKPFVVLTALQRGVVKRDEIIDTTSFKLSGKEIVDVAPRAQQTLDEILMNSSNRGVSRLALRMPPSALMETYQNAGLSKPTDLGLIGEQVGILNANRKRWADIERATVAYGYGITATPLQIARAYATLGSFGVYRPLSITKVDPPVIGKRVFSEKITKDIVGILEKVAIKNKRAMVEGYRVGVKTGTARKIENGHYVNKYVAFTAGIAPISDPRYALVVLINDPKAGEYYGGAVSAPVFSNIMGYALRANAIPQDAEAAENTTTKSAKRIVYIGEHKNQKVN

SEQ ID NO: 313 - protein, 610 aa, HAEMOPHILUS INFLUENZAE
MCGIVGAVAQRDVAEILINGLHRLEYRGYDSAGVAVINKQNELQRIRCLGKVKALDEAVSEKPLIGGTGIAHTRWATHGEPSETNAHPHSSGTFAVVHNGIIENHEELRELLKSRGYVFLSQTDTEVIAHLVEWEMRTTDSLLDAVKKAVKQLTGAYGMVVMDSRHPEHLVAARSGSPLVIGLGIGENFLASDQLALLSVTRRFIFLEEGDIAEITRRTVDIYDTHGNKAKREIHESNLENDAAEKGKFRHFMQKEIYEQPTALINTMEGRINHENVIVDSIGNGAKGILEKVEHIQIVACGTSYNAGMVARYWFESLAGVSCDVEIASEFRYRKFVTRPNSLLITLSQSGETADTLAALRLAKEKGYMAALTICNVAGSSLVRESDLAFMTRAGVEVGVASTKAFTTQLAALLMLVTALGKVKGHISVEKEREIIKAMQSLPAEIEKALAFDTEIEALAEDFAEKHHALFLGRGAFYPIAVEASLKLKEISYIHAEAYAAGELKHGPLALIDADMPVIVVAPNNELLEKVKSNIEEVRARGGQLYVFADKEAGFTPSEGMKIITMPKVNDIVAPIFYTIPMQLLSYYVALIKGTDVDQPRNLAKSVTVE

SEQ ID NO: 314 - protein, 456 aa, HAEMOPHILUS INFLUENZAE
MTKKALSAVILAAGKGTRMYSDLPKVLHTIAGKPMVKHVIDTAHQLGSENIHLIYGHGGDLMRTHLANEQVNWVLQTEQLGTAHAVQQAAPFFKDNENIVVLYGDAPLITKETLEKLIEAKPENGIALLTVNLDNPTGYGRIIRENGNVVAIVEQKDANAEQLNIKEVNTGVMVSDGASFKKWLARVGNNNAQGEYYLTDLIALANQDNCQVVAVQATDVMEVEGANNRLQLAALERYFQNKQASKLLLEGVMIYDPARFDLRGTLEHGKDVEIDVNVIIEGNVKLGDRVKIGTGCVLKNVVIGNDVEIKPYSVLEDSIVGEKAAIGPFSRLRPGAELAAETHVGNFVEIKKSTVGKGSKVNHLTYVGDSEIGSNCNIGAGVITCNYDGANKFKTIIGDDVFVGSDTQLVAPVKVANGATIGAGTTITRDVGENELVITRVAQRHIQGWQRPIKKK

SEQ ID NO: 315 - protein, 472 aa, HAEMOPHILUS INFLUENZAE
MPNANAIANVFKLIEENNVKFVLLRFTDIKGKEHGVSIPVSLVDEDMFEDGKMFDGSSVEGWKTINKADMLLMPMAETAIVDPFAQIPTLSIRCSVYEPTTMQSYDRDPRSIAIRAENYMRSTGIADQAFFGPEPEFFLFDDVRFNVSMNKASFSIDDIEAAWNTNKKYEEGNNAYRPLKKGGYCAVAPIDSAHDIRSEMCLILEEMGLVIEAHHHEVATAGQNEIATKFNTLTLKADETQIYKHVVQNVALEHGKTACFMPKPITGDNGSGMHCNMSLSKDGKNIFQGDKYAGLSETALYYIGGIIKHAKALNAFTNPSTNSYKRLVPGYEAPVLLAYSASNRSASIRIPAVTNPKAIRVEARFPDPLANPYLAFAALLMAGLDGVVNKIHPGDAMDKNLYDLPPEELKDIPAVASSLEEALNSLEKDYEFLTQGGVFAKDFIDAFISIKRKEVERLNMAPHPVEFEMYYA

SEQ ID NO: 316 - protein, 292 aa, HAEMOPHILUS INFLUENZAE
MFKKALFILSLCPSFALAQSYVVYDFTHNRVLESHASDSIQPIASVTKLMTANVFLENNKNPNCRIAITKEDTDRIKGTGTKLPKNIPISCNELLKAMLVHSDNYAAHALSRAAGISRRQFIKKMNEKAHQLGMYSTRFHDSSGLSSYNISSPMDLVKLAKYSLNKSDIKRLSNLSATYIQAGKQKLYIKNTNKLVRDEIFDAAVNKTGYIQESGYNLVFINKHRCKNATIGVISLNNTSSAYRSSFTKSKLEKFGCTALNGRTIRDVAGEAQYEDGYDEVGFNTLIQKLSK

SEQ ID NO: 317 - protein, 593 aa, HAEMOPHILUS INFLUENZAE
MKKVALISLCIFTALSAFADSPNTATASINLEQEKQNWELAQHQDYLKRLKQREVFLQVEGLLKSAVKKQQFSEATQNITKTLIDSLQGYPLQYDLLARFWETKIAFLQNDDIQGRQQAINELNALVQQNYPFVTPAFQALLQKLSTLNEQQTSATSDNAKENNRVQKEQNQVENPKQLAEIVRKSDPNTLDKTVLIDAFPRYLKTLPEQMNNLSFESYQKWANTWQLSEDEIKQWKIAFLNRFFDNENTDFQKWRDEQIRQLQTDNLTERRLRMAIWQKTELTSWLNLLSAESKSKQEWRYWEAKQDILKNTKKLTALSKERGFYPMLAATQLKQAYQLNVPIAPSFTQAEQLPFKQVFAMITELRELGRNGLAKQRWRILLDNVDFTTQLKLSEYAKNQQWFELAVDASIVAKAWDYLSLRLPNAYSEYFNAALQNLNISKTFAMAIARQESAWNPMAQSSANARGLMQLLPSTAKLTAENNQLPYQGEQDLFKPLNNILLGTAHLNELNGKYPNNRILIAAAYNAGANRVGKWLSRASGKLALDEFVASIPFYETRGYVQNVVAYDFYYQILQNKENPQIFSQEELNRLY

SEQ ID NO: 318 - protein, 194 aa, HAEMOPHILUS INFLUENZAE
MVQQKIANLLQGDFRYQIQYNWVSLENISPNIQLAVISSEDQRFLEHLGFDFEAIQRAIRYNEKSNKGIRGASTISQQTAKNLMLWHGQNWLRKGLEVPATMLLELTWSKKRILEVYLNIAEFGNGIFGVEAASRYYFKKSAKNLSQNEAALLAAVLPNPIIYKVNKPSLLVRKKQTWILRQMGNLGTEYLSHL

SEQ ID NO: 319 - protein, 155 aa, HAEMOPHILUS INFLUENZAE
MKKTNMALALLVAFSVTGCANTDIFSGDVYSASQAKEARSITYGTIVSVRPVKIQADNQGVVGTLGGGALGGIAGSTIGGGRGQAIAAVVGAIGGAIAGSKIEEKMSQVNGAELVIKKDDGQEIVVVQKADSSFCSLVAEFVFVGGGSSLNVSVL

SEQ ID NO: 320 - protein, 286 aa, HAEMOPHILUS INFLUENZAE
MNKILLKTTIIFTALFSLNVVASPLDWQKVKRPIPSEDGKASPIGSYTNGCIIGAQALPPKGEGYQVIRMNRNRYYGHPNMIQYLERLGQRAKAAGLPTMLVGDIAMPGGGRFLTGHASHQMGLDADIWLRMGEMSDADALNSDGKGLLVVDRKAQRVDERVWNSNHATLIKLAAQDPNVTRIFVNPAIKVKLCQTAGNDRGWLHKIRPWHGHNSHFHVRLTCPADASYCENQAPVPAGDGCGDELYSWFEPPKPGTSVSKPKVTPPEPFLCQQILNSPNRREWLE

SEQ ID NO: 321 - protein, 360 aa, HAEMOPHILUS INFLUENZAE
MLVWLAEYLVRYETAFNAISYITVRANLALLTALFISLWIGPKVIKRLQILKFGQEVRNDGPESHFAKKGTPTMGGVMILFSIGVSTLLWANLANPYIWVCLFVLFGYGAIGFVDDFRKITRKNTDGLIARWKYFWMSVVALVAILWLYWLGHDTDATRLVIPFFKDIMPQLGLFYIVLSYFVIVGTGNAVNLTDGLDGLAIMPTALVAGAFALIAWATGNVNFAEYLHIPYIKYSSEVVVFCTAIVGASLGFLWFNTYPAQVFMGDVGSLALGGALGVVAILVRQEFLLVIMGGVFVVEALSVILQVGSYKLRKQRIFRMAPIHHHFELKGWPEPRVIIRFWIISLMLVLMGLVTLKLR

SEQ ID NO: 322 - protein, 341 aa, HAEMOPHILUS INFLUENZAE
MQNLQPFHTFHIQSNAREIIEAHSIEQLQQVWANSKSENLPTLFLGQGSNVLFLDDFNGIVILNRLMGITHEQDANFHYLHVNGGENWHKLVEWSINNGIYGLENLALIPGCAGSAPIQNIGAYGVEFKDVCDYVEVLNLNTNETFRLDTEQCEFGYRESIFKHRYQQGYVITAVGLKLKKDWQPILKYGSLVEFDPKTVTAKQIFDEVCHIRQSKLPDPNEVGNAGSFFKNPVVSSEHFEEIKKHHENLPHFPQADGSVKLAAGWLIDQCNLKGFQIGGAAVHKKQALVLINKNGATGQDVVKLAHHVRQTVAEKFGVYLQPEVRFISATGEVNSEQIIT

SEQ ID NO: 323 - protein, 475 aa, HAEMOPHILUS INFLUENZAE
MKHSHEEIRKIIPEMRRVQQIHFIGIGGAGMSGIAEILLNEGYQISGSDIADGVVTQRLAQAGAKIYIGHAEEHIEGASVVVVSSAIKDDNPELVTSKQKRIPVIQRAQMLAEIMRFRHGIAVAGTHGKTTTTAMISMIYTQAKLDPTFVNGGLVKSAGKNAHLGASRYLIAEADESDASFLHLQPMVSVVTNMEPDHMDTYEGDFEKMKATYVKFLHNLPFYGLAVMCADDPVLMELVPKVGRQVITYGFSEQADYRIEDYEQTGFQGHYTVICPNNERINVLLNVPGKHNALNATAALAVAKEEGIANEAILEALADFQGAGRRFDQLGEFIRPNGKVRLVDDYGHHPTEVGVTIKAAREGWGDKRIVMIFQPHRYSRTRDLFDDFVQVLSQVDALIMLDVYAAGEAPIVGADSKSLCRSIRNLGKVDPILVSDTSQLGDVLDQIIQDGDLILAQGAGSVSKISRGLAESWKN

SEQ ID NO: 324 - protein, 437 aa, HAEMOPHILUS INFLUENZAE
MNAYQNKNITIIGLGKTGLSCVDYLLSQQANIRVIDTRKNPTGIDKLPQNIPLHTGSLNQEWLLESDMIVISPGLAVKTPEIQTALKAGVEVIGDIELFCRAATKPIVGITGSNGKSTVTTLVYEMAKAAGVKVGMGGNIGIPALSLLNEDCELYVLELSSFQLETTYSLKAAAATVLNVTEDHMDRYMDLEDYRQAKLRIYHNAKVGVLNNEDRLTFGENENQAKHTVSFAENSADYWLKTENGKQYLMVKDEVILPCEEATLVGRHNYMNILAATALAQAIGINLDSIRTALRHFKGLDHRFQLVHQANGIRWINDSKATNVGSTVAALAGLYIEGKLHLLLGGDGKGADFSELAELINQPHIICYCFGRDGALLAKFSSQSYLFDTMEQAIEFLRPTLQSGDMVLLSPACASLDQFASFEKRGEEFTHLAQCLT

SEQ ID NO: 325 - protein, 488 aa, HAEMOPHILUS INFLUENZAE
MKKLTALFNLPELKNDIELHNMVLDSRKVKAGDLFVAIKGHQVDGNQFIDSALHSGASAVVSETELSSEHLTVAFIGNVPVVKYYQLAHHLSSLADVFYDSPSNNLTLVGVTGTNGKTTISQLLAQWAELLGHRAAVMGTIGNGLFGQIVEAKNTTGSAVEIQSSLSAFKHAGADFTSIEVSSHGLAQHRVEALHFKAAIFTNLTRDHLDYHQSMENYAAAKKRLFTELDTQIKVINADDEIGYQWLTELPDAIAVSMNADFKVGSHQWMKAINIHYHFKGADITFESSWGNGVLHSPLIGAFNVSNLLLVMTTLLSFGYPLENLLATAKSLKGVCGRMEMIQYPNKPTVIVDYAHTPDALEKALIAAREHCQGELWCIFGCGGDRDRGKRPLMAQVAEQFAEKIIVTKDNPRTESQSQIETDIVAGFKNMEKVGIIPDRAQAIQFAIESAVENDVILIAGKGHEHYQIIGSEVVHFSDQEIALDFLK

SEQ ID NO: 326 - protein, 457 aa, HAEMOPHILUS INFLUENZAE
MIKLSTVQLAQILQAKLIGDENVQVEKINTDTRKSVSNSLFFALKGEKFDAHQYLDQAVSQGALALVVQQENSSISVPQLVVKDTRIALGELAKWLREKINPRTVAMTGSSGKTTVKEMTASILQHTAADSEAVLFTNGNFNNDIGVPLTLLRLTEKHRFAVIELGANHQNEINYTTKLVQPNAALINNIAPAHLEGFGSLAGVVQAKGEIYRGLTKNGVAIINAEHNHLDIWQKEISNHAIQYFNGKDYSAKNIHHTSQGSTFTLISPQGEIEITLPYLGEHNVKNALAATALAMNVGATLTDVKAGLEQRSQVKGRLFPIQVTPNLLLLDDTYNANKDSLCAAIDVLKGYDAFRILCVGDMKELGENSLAIHREVGQYINLVNLDLVCSYGNESAVISEAVSGKHFTDKTEMVDFLVPLIENQLQQNKKVVVLGKGSRSMKMEDVIYSLKDKIKC

SEQ ID NO: 327 - protein, 351 aa, HAEMOPHILUS INFLUENZAE
MKNKKLLVMAGGTGGHVFPAIAVAQTLQKQEWDICWLGTKDRMEAQLVPKYGIPIRFIQISGLRGKGIKALLNAPFAIFRAVLQAKKIIQEEKPDAVLGMGGYVSGPAGVAAKLCGVPIILHEQNAIAGLTNKLLGKIATCVLQAFPTAFPHAEVVGNPVREDLFEMPNPDIRFSDREEKLRVLVVGGSQGARVLNHTLPKVVAQLADKLEFRHQVGKGAVEEVSQLYGENLEQVKITEFIDNMAEAYAWADVVICRSGALTVCEIAAVGAAAIFVPFQHKDRQQYLNAKYLSDVGAAKIIEQADLTPEILVNYLKNLTRENLLQMALKAKTMSMPNAAQRVAEVIKQYSN

SEQ ID NO: 328 - protein, 269 aa, HAEMOPHILUS INFLUENZAE
MDKKEKRPTVLFFDSGVGGFSVYREAKKLLPNWHYLYCFDNAGFPYSERKEESIIHRTLAACQLINQRYPLDAMVIACNTASTVVLPPLRAAFDIPIIGTVPAIKPASEITKTKHIGLLATKGTVKRHYIDELIDKFAQDCIVERLGTTKLVEIAEQKIRGHSVDLISLKDELSSWAGMADLDTLVLGCTHFPLIKDEIQLCLPQVKYFMEPSAAIAKRIKYLLDDKNLQAQNEKYNQMFCTAHFPEESQFKKALHLWGFESLEVIKID

SEQ ID NO: 329 - protein, 424 aa, HAEMOPHILUS INFLUENZAE
MDKFRVYGQSRLSGSVNISGAKNAALPILFAAILATEPVKLTNVPELKDIETTLKILRQLGVVVDRDATGAVLLDASNINHFTAPYELVKTMRASIWALAPLVARFHQGQVSLPGGCSIGARPVDLHISGLEKLGADIVLEEGYVKAQVSDRLVGTRIVIEKVSVGATLSIMMAATLAKGTTVIENAAREPEIVDTADFLNKMGAKITGAGSAHITIEGVERLTGCEHSVVPDRIETGTFLIAAAISGGCVVCQNTKADTLDAVIDKLREAGAQVDVTENSITLDMLGNRPKAVNIRTAPHPGFPTDMQAQFTLLNMVAEGTSIITETIFENRFMHIPELIRMGGKAEIEGNTAVCHGVEQLSGTEVIATDLRASISLVLAGCIATGETIVDRIYHIDRGYEHIEDKLRGLGAKIERFSGSDEA

SEQ ID NO: 330 - DNA, 19 bp, ARTIFICIAL
  Primer
gttcaggccattatcttcc

SEQ ID NO: 331 - DNA, 23 bp, ARTIFICIAL
  Primer
tggtagtggtaaaacaacgattg

SEQ ID NO: 332 - DNA, 20 bp, ARTIFICIAL
  Primer
gtgtaaggcgcagtttgttc

SEQ ID NO: 333 - DNA, 20 bp, ARTIFICIAL
  Primer
tctcgccaatgctgtacgtc

SEQ ID NO: 334 - DNA, 20 bp, ARTIFICIAL
  Primer
tgatactcgagagcttgcag

SEQ ID NO: 335 - DNA, 20 bp, ARTIFICIAL
  Primer
ctattcaaggtggtgcgctg

SEQ ID NO: 336 - DNA, 20 bp, ARTIFICIAL
  Primer
taggcgcaaccacaatagtc

SEQ ID NO: 337 - DNA, 1324 bp, ARTIFICIAL
  DNA sequence of tmk encoding a C-terminal hexahistidine tag.
ccatgggcagcagcaaaggaaagtttattgtcattgagggcttagaaggtggtacccgtcgtcgtttcctttcaaataacagtaactcccgaatcttccagcggggaaaagctccgctcatcagtctgtagtgcgagttttgcatgaactcgccccttttcgaggcgagtagtcagacatcacgctcaaaacgtacttgatggtattcaagatgttgtgtttacgcgcgagcctggtggaacgccactggaccataagttctacaacacaaatgcgcgctcggaccaccttgcggtgaccctgagaaattacgtcatctcatcaaacatgaaaccgaagaacccgtgacagactctttaatgcagtagagtagtttgtactttggcttcttgggcactgtgataaagcagagttattaatgctttatgcggctcgtattcagttggtggactatttcgtctcaataattacgaaatacgccgagcataagtcaaccacctaaatgtgattaaacctgctttaatgcaagggaaatgggtagtgggcgatctttacactaatttggacgaaattacgttccctttacccatcacccgctaggtcacgatatgtcatctcaggcgtatcagggtggtggacgtcaattagaccagtgctatacagtagagtccgcatagtcccaccacctgcagttaatctgccgcattttatgctcaccttgaaagaaaccgtattaggtaattttgagccggcgtaaaatacgagtggaactttctttggcataatccattaaaactcggagatctcacaatttatttggatatagatccgagcgtcggtttagcgcgagtctagagtgttaaataaacctatatctaggctcgcagccaaatcgcgctcctcgtggacgtggcgagttagatcgtattgagcaaatggatttagattttgagcacctgcaccgctcaatctagcataactcgtttacctaaatctaaaattccatcgtactcgagcacgctatttagaattagtaaaagataatcccaaaaggtagcatgagctcgtgcgataaatcttaatcattttctattagggttagcagtggtgattaatgcagagcagagtattgaacttgttcaagctgatatcgtcaccactaattacgtctcgtctcataacttgaacaagttcgactatttgaaagtgcggtaaaaaattggtggaaatcaaacgaaaaagcagctcacaactttcacgccattttttaaccacctttagtttgctttttcgtcgagtgcatcaccatcaccattgaggatcc

SEQ ID NO: 338 - DNA, 24 bp, ARTIFICIAL
  Primer
gtagtggtagtggtaactcctagg

SEQ ID NO: 339 - protein, 221 aa, ARTIFICIAL
  Amino acid sequence of tmk encoding a C-terminal hexahistidine ta g
MGSSKGKFIVIEGLEGAGKSSAHQSVVRVLHELGIQDVVFTREPGGTPLAEKLRHLIKHETEEPVTDKAELLMLYAARIQLVENVIKPALMQGKWVVGDRHDMSSQAYQGGGRQLDPHFMLTLKETVLGNFEPDLTIYLDIDPSVGLARARGRGELDRIEQMDLDFFHRTRARYLELVKDNPKAVVINAEQSIELVQADIESAVKNWWKSNEKAAHHHHHH

SEQ ID NO: 340 - protein, 381 aa, HAEMOPHILUS INFLUENZAE
MKYALINCVIYTKYDVLRDFAVIINGEIIEAVIPQAELETGIKTIDLQGNNLTAGFIDLQLNGCGGVMFNDQTSVETLEIMQETNLKSGCTSFLPTFITAPDENIKSAVKIMREYLNKHKNQALGLHIEGPYLSIEKKGVHRPEYIREITPEMKDFLCENGDVITKMTIAAENPTINYTPDFVKAGIIVSVGHSNATYEVAKAAFHKGATFATHLHNAMSPISSGREMGVVGAVLDSDVYTGIIVDGVHINYGNVRIDKKIKGDKLCIVTDSIAAAGAPPELESFTFVGKTIYIKEGRCYDANDTIAGASITMMESIKNAVEYVEIPLAEAIRMSNLYPARAIGIDDRLGSVEKGKIANLAVFTPNYQVIGTVVNGKWKEN

SEQ ID NO: 341 - protein, 153 aa, HAEMOPHILUS INFLUENZAE
MNKFVKSLLVAGSVAALAACSSSNNDAAGNGAAQTFGGYSVADLQQRYNTVYFGFDKYDITGEYVQILDAHAAYLNATPAAKVLVEGNTDERGTPEYNIALGQRRADAVKGYLAGKGVDAGKLGTVSYGEEKPAVLGHDEAAYSKNRRAVLAY

SEQ ID NO: 342 - protein, 651 aa, HAEMOPHILUS INFLUENZAE
MNLKKFFNTPTHEPFRDKKAERNLFARRTLVAFLGILLLTGVLFTNIYQLQIVNFDTYQTRSNGNRIKLLPLPPTRGLIYDRYGKLLAENLTFFGLYIVPEKTENLDRTLDELRYIVGLTDNDIENFKKERRRGTRYTPILLKPNLTEEQISRFAVNGYQYPSLEVRPYFKRHYLYGETMAHILGYVGKMNDKDVERLKREDKFANYAGTNDIGKLGIERYYEDILQGTTGFEEVEINNRGKVIRTLRSRPAVAGKSIHLTIDLALQRYITELLSGLKGAVVVLDPKDSSVLAMVSTPSYDNNLFVDGISSEDYKRLLNDLARPLYSRATQGAYPPASTVKPFIAVAAQTENVITPNTTIFDPGYWVLPNSTKRFRDWKKTGHGDTDLNKAITESSDTYFYQVAYNMGIDRLSNWMKDFGFGMPTGIEIQEETAANIPTREWKQKRYKRPWVQGDTISVGIGQGYWTATPLQVAKATTILVNNGKVNTPHLMKAIEGAVLEPYEDPLLYPDINTPKVAAWEAAKRGMYNVVNAANGTGRKAFADANYRVAGKSGTAQVFSLKENEKYNTAGLKKELHDHAWFTAYAPYDNPKLVVTVILENAGGGSSNAAPLARKVMDYYLNQRLPQVEKYNVPIQQKKDLSQESEQINGR

SEQ ID NO: 343 - protein, 864 aa, HAEMOPHILUS INFLUENZAE
MRIAKLILNTLLTLCILGLVAGGMLYFHLKSELPSVETLKTVELQQPMQIYTADGKLIGEVGEQRRIPVKLADVPQRLIDAFLATEDSRFYDHHGLDPIGIARALFVAVSNGGASQGASTITQQLARNFFLTSEKTIIRKAREAVLAVEIENTLNKQEILELYLNKIFLGYRSYGVAAAAQTYFGKSLNELTLSEMAIIAGLPKAPSTMNPLYSLKRSEERRNVVLSRMLDEKYISKEEYDAALKEPIVASYHGAKFEFRADYVTEMVRQEMVRRFGEENAYTSGYKVFTTVLSKDQAEAQKAVRNNLIDYDMRHGYRGGAPLWQKNEAAWDNDRIVGFLRKLPDSEPFIPAAVIGIVKGGADILLASGEKMTLSTNAMRWTGRSNPVKVGEQIWIHQRANGEWQLGQIPAANSALVSLNSDNGAIEAVVGGFSYEQSKFNRATQSLVQVGSSIKPFIYAAALEKGLTLSSVLQDSPISIQKPGQKMWQPKNSPDRYDGPMRLRVGLGQSKNIIAIRAIQTAGIDFTAEFLQRFGFKRDQYFASEALALGAASFTPLEMARAYAVFDNGGFLIEPYIIEKIQDNTGKDLFIANPKIACIECNDIPVIYGETKDKINGFANIPLGENALKPTDDSTNGEELDQQPETVPELPELQSNMTALKEDAIDLMAAAKNASSKIEYAPRVISGELAFLIRSALNTAIYGEQGLDWKGTSWRIAQSIKRSDIGGKTGTTNSSKVAWYAGFGANLVTTTYVGFDDNKRVLGRGEAGAKTAMPAWITYMKTALSDKPERKLSLPPKIVEKNIDTLTGLLSPNGGRKEYFIAGTEPTRTYLSEMQERGYYVPTELQQRLNNEGNTPATQPQELF

SEQ ID NO: 344 - protein, 781 aa, HAEMOPHILUS INFLUENZAE
MTSQHSAKKSSKNTPKNNRTFKGFLLKFSFTALVLTIFYGGYLDWQIRSKMDGQIWHLPAEVYSRLESVKIADNLAFDEVIQILLDNEYRQTTMVAAPGDFKLEDDSIVVLRRAFPFPDKAEPQRVLRLRFSHNKLSRIEDLVTVKTVDEFRLAPKLIAMLQSDNEDRLAIPLQNYPRLLIDTLILTEDRRFYEHNGINPVGILRALIANIRAGQTVQGGSTLTQQLVKNLFLSRERTITRKANEALMSLVLDWRYDKNRILETYLNEIYLGQNGDTQIHGFELASQFYFGRSIREISLDQIALLVGMVKGPSLYNPWRNPQNALERRNIVLRLMLEHKMIGDELYQLLSQRPLGVQKKGQISRKYPAFIQTLQADLRRKLGEHKISSLLGARIFSTMDLKQQAQAENAVGNTVSQLQLKMKNPHLEGAMIITDYRTGEIRAVVGGLQTQYAGFNRALMAKRQIGSLVKPSIYLTALSNPEQFRLNTPINNQPITINVKGSPPWQPRNYDKKYSDSVMLMDALARSLNIPTVNIGMKVGLSKVIDTQKAMGWDNVEIPKVPAMLLGSYTISPYDVTKLYQTLANQGGRIALTTVDSIADRQGNLIFQHDKSAKQVVPQEAAFQTLFAMQQTVERGTARSLQKDYADLHLAGKTGTTNESRDTWFVGIDGKNISTVWLGRDDNGETKLTGASGALQIYKDYLNRTNIEKLAITPPTTVKWVGINQYGDWDCESYRTIPIWLNNGQNFCGETSSPSLTPTTETETPPQESLWDVLDNPNPPAQ

SEQ ID NO: 345 - protein, 445 aa, HAEMOPHILUS INFLUENZAE
MANRKYFGTDGVRGKVGAYPITPDFALKLGWAAGKVLASQGSKMVLIGKDTRISGYMLESALEAGLAAAGLSAAFTGPMPTPAIAYLTRTFRAEAGIVISASHNPYYDNGIKFFSAKGTKLPDEIEEAIEAMLEQPMDCVESAELGKASRINDAAGRYIEFCKGTFPAHLGLEGYKIVVDCANGATYHIAPNVLRELGAEVIEIGTDPNGLNINEKCGATDVTALQAKVVETKADVGLAYDGDGDRIMMVDHLGNKVDGDQILFIIAREALRSGQLKGGVVGTLMSNMSLEIALKMLGVPFLRANVGDRYVLEKMVENDWTLGGENSGHIIIADKNTTGDGIVASLAVLAAMAQHKLSLNELASAVKLFPQVLINVRFAGGENPLESDAVKSVAAEVEKRLEGKGRILLRKSGTEPLIRVMVECQDAELAQQCAEEIAEAVKKIN

SEQ ID NO: 346 - DNA, 20 bp, ARTIFICIAL
  Primer
atccactcgtccgaatgcgg

SEQ ID NO: 347 - DNA, 40 bp, ARTIFICIAL
  Primer
gcttcccggtatcaacagggccacgtacaccatctgttcc

SEQ ID NO: 348 - DNA, 40 bp, ARTIFICIAL
  Primer
ggaacagatggtgtacgtggccctgttgataccgggaagc

SEQ ID NO: 349 - DNA, 48 bp, ARTIFICIAL
  Primer
cacggcttctgcaatttcttcggcgtagcaccaggcgtttaagggcac

SEQ ID NO: 350 - DNA, 50 bp, ARTIFICIAL
  Primer
ggtgcccttaaacgcctggtgctacgcccgaagaaattgcagaagccgtg

SEQ ID NO: 351 - DNA, 20 bp, ARTIFICIAL
  Primer
tctgatgcgactgatgctac

SEQ ID NO: 352 - DNA, 20 bp, ARTIFICIAL
  Primer
tgttggcgcatcacgtgtac

SEQ ID NO: 353 - DNA, 20 bp, ARTIFICIAL
  Primer
cgcagaaacagaaatcccag

SEQ ID NO: 354 - DNA, 20 bp, ARTIFICIAL
  Primer
cctcttacgtgccgatcaac

SEQ ID NO: 355 - DNA, 20 bp, ARTIFICIAL
  Primer
tctgtgatggcttccatgtc

SEQ ID NO: 356 - DNA, 20 bp, ARTIFICIAL
  Primer
ggattgtgtggaatctgctg

SEQ ID NO: 357 - DNA, 3360 bp, ARTIFICIAL
  Sequence of the mrsA coding sequence and flanking regions.
  misc_feature (3208)..(3208): a or g or t or c
gaagaacaaattaaacaattgatgaatcgcgaacctgtcacaccgccatcaggttggggagagccgaaaactcagcaggctgcttatgcaaattcaacaacgaatgatacaaagcccgaaagtgcggtagaaaataccgatgattttaatgtttaactcatcaaagcctttcttcggaaaggctttattttttcctaatgattttgttcttggatgtatttcgctataatcgcccaccaaaatcactctaaaaattaaccgcattttatgaaactttacgcaaataataaatgtcttgatttaagcgtgcctcaaattatggggattcttaattttacgcctgattctttttctgatagcggacagttttttagtctagataaagcactttttcaagttgaaaaaatgctagaagagggggcgacaattattgatattggtggagaatccactcgtccgaatgcggatgaagtttctgaacaagaggaattgcatcgtgttgtgccagtagtggaggcggtgcgaaaccgttttgattgctggatttctgttgattcctcaaaagctgttgtgatgcgtgaagcggcaaatgttggaatggatttgattaatgatattcgtgctttgcaagagccgaatgcgttagaaacggcggtaaaactggctttacctgtttgtattatgcatatgcaagggcaacctcgcacgatgcaagcaaatccttattatgaaaatgtcgtgcaagatgtattggcttttttacaaaaacgtactaatgaatgcctttctgctggcattaaaaaagaaaatttaatttgggatatgggctttggctttggcaaatctgtacagcataattatcaattattacaaaatctgaatgaattttgtcagataggttatcccgtattagcagggttatctcgcaaatcaatgattggcgcagtgcttgataaacctgttgatcaaagaataattggcagtgcggcaggtgcgcttattgcagtgcaaaaaggtgcaaaaattttacgcgtacatgatgttgctgcaacatcagatatgctcaaagtttggcaggcaacagcaaatgcctgatggttttataacgataaaaaattaaaggaattttattatggcaaatcgtaaatattttggaacagatggtgtacgtggaaaagtaggtgcttacccaattacaccagatttcgcattaaaattaggttgggctgcgggaaaagtgttggcttctcaaggttcgaaaatggttttaattggtaaagacacccgaatttctggatacatgttggaatcagcccttgaagcaggtttggctgctgcggggttatctgctgcatttaccggccctatgccgacacctgcaattgcttatttaaccagaactttccgagctgaagcaggtatcgtgatctcagcctctcataatccttattatgataatgggattaaattcttttcagcaaaaggcactaaattacctgatgaaattgaagaagctattgaagcaatgttagagcaaccgatggattgtgtggaatctgctgaattaggtaaagccagccgtattaatgatgcagcaggacgctacattgagttttgtaaaggtacattccccgctcatttaggcttggaaggttataagatcgtggtagattgtgcaaatggtgcaacttaccatattgcccctaatgtactaagagaacttggtgcggaagttattgaaattggtacggatccaaatggtttaaacattaatgaaaaatgtggcgcaactgatgtgactgcattgcaagctaaagttgttgaaacgaaagctgatgttggtttggcttatgatggcgatggtgaccgcattatgatggtggatcatttaggaaataaagtcgatggcgaccaaattctctttattattgcgcgtgaagcattgcgctcaggtcaattaaaaggcggtgtcgttggcaccttaatgagtaatatgagcttagagattgcgttgaaaatgcttggtgttcccttcttacgtgcaaacgtgggagaccgttatgtattggaaaaaatggttgaaaatgattggacgcttgggggggagaattctggacatattatcattgcggataagaatacaacgggtgatggcattgttgcgtcattggctgtattggcggcgatggcacagcataaattatcattaaatgaattagcaagtgcggttaaattattccctcaagtgttaatcaatgtacgttttgcgggtggggaaaatccacttgaaagtgatgctgtaaaatctgttgccgcagaggttgaaaaacgtttagaaggtaaaggtcgtattttattgcgtaaatcgggtacggaaccacttattcgcgttatggtggaatgccaagatgctgaacttgcacaacaatgtgcagaagaaattgcagaagccgtgaaaaaaattaattaatttttgaccgcacttagtaaagtgcggtttatttttataaagtttttaggaaagcaaaatgaacatttttattatgcgtcacggcgaagcggaagtaatggctaatagtgataaagctcgccatttaactgtttatggttctaaacaggcttttttacaagggcagtggttaaaacagcatttaagcacgctagtaattaattcactagaccgtattttagtgagcccttatgtcagagctcaagaaacctttcatcaagttaatcaagcgtttgatttggagttagaaaataaatttgaaatttgggaggggattacgccttatggccatgcgcattcagtcattgattatttagaagtgctaaaagacgagggcgttaaatctgtattaattgtttcccatttgcccttagtgggagaaattgttgctgaactgtatggaaaacgaaatccaatatcattttatcctgcaactattgctcaattattatgggatggtaataaatcagaaatattgatgcatcaagcatctcctgtaatttatttaaaataaactattctttttttttacaaaaaataaaatttttattggttttttataatctattaaaaatcaatatcttagatgtttttttataaagtaatctttttaaagaaaggtaaagttttactattactgtttttctttttatgaaaattcccgtaaactaaactgcatcaaagtaatagggctttgtnacaatcaaattattctatggagaaaataatgaaaaaattaacattagcattggttttaggttcagctttagtcgtgacaggttgttttgataagcaagaagcaaaacaaaaagttgaggatacgaagcaaactgtagcatcagtcgcatcag

SEQ ID NO: 358 - DNA, 3360 bp, ARTIFICIAL; identical to SEQ ID NO: 357
  Sequence of the mrsA coding sequence.
  misc_feature (3208)..(3208): a or g or t or c

SEQ ID NO: 359 - DNA, 20 bp, ARTIFICIAL
  Primer
aactcagcaggctgcttatg

SEQ ID NO: 360 - DNA, 20 bp, ARTIFICIAL
  Primer
tctgatgcgactgatgctac

SEQ ID NO: 361 - DNA, 20 bp, ARTIFICIAL
  Primer
ggaaaagtaggtgcttaccc

SEQ ID NO: 362 - DNA, 20 bp, ARTIFICIAL
  Primer
cagcagattccacacaatcc

SEQ ID NO: 363 - DNA, 1338 bp, ARTIFICIAL
  Sequence of mrsA.
atggcaaatcgtaaatattttggaacagatggtgtacgtggaaaagtaggtgcttacccaattacaccagatttcgcattaaaattaggttgggctgcgggaaaagtgttggcttctcaaggttcgaaaatggttttaattggtaaagacacccgaatttctggatacatgttggaatcagcccttgaagcaggtttggctgctgcggggttatctgctgcatttaccggccctatgccgacacctgcaattgcttatttaaccagaactttccgagctgaagcaggtatcgtgatctcagcctctcataatccttattatgataatgggattaaattcttttcagcaaaaggcactaaattacctgatgaaattgaagaagctattgaagcaatgttagagcaaccgatggattgtgtggaatctgctgaattaggtaaagccagccgtattaatgatgcagcaggacgctacattgagttttgtaaaggtacattccccgctcatttaggcttggaaggttataagatcgtggtagattgtgcaaatggtgcaacttaccatattgcccctaatgtactaagagaacttggtgcggaagttattgaaattggtacggatccaaatggtttaaacattaatgaaaaatgtggcgcaactgatgtgactgcattgcaagctaaagttgttgaaacgaaagctgatgttggtttggcttatgatggcgatggtgaccgcattatgatggtggatcatttaggaaataaagtcgatggcgaccaaattctctttattattgcgcgtgaagcattgcgctcaggtcaattaaaaggcggtgtcgttggcaccttaatgagtaatatgagcttagagattgcgttgaaaatgcttggtgttcccttcttacgtgcaaacgtgggagaccgttatgtattggaaaaaatggttgaaaatgattggacgcttgggggggagaattctggacatattatcattgcggataagaatacaacgggtgatggcattgttgcgtcattggctgtattggcggcgatggcacagcataaattatcattaaatgaattagcaagtgcggttaaattattccctcaagtgttaatcaatgtacgttttgcgggtggggaaaatccacttgaaagtgatgctgtaaaatctgttgccgcagaggttgaaaaacgtttagaaggtaaaggtcgtattttattgcgtaaatcgggtacggaaccacttattcgcgttatggtggaatgccaagatgctgaacttgcacaacaatgtgcagaagaaattgcagaagccgtgaaaaaaattaattaa

SEQ ID NO: 364 - DNA, 3280 bp, ARTIFICIAL
  Sequence of the rpL19 and rpS16 genes and flanking regions.
aatttgatctgcttttgctccccgctccattaaagtctgaacaaattgctctgaattatctgtttgacgaatataaatttttgcctgatcatttgctaaaaaagacaccagtaagtttttcttcatttcctgaattaaattagcatcaacagtatttattggctcaaagtataagtaatcaagaaatttaggcgtgagatttttatctgttttaaaaatgcgagtgaggattttttcgcttatttggatctgattatcaagaaattggggaggtaaagaaaaaagtgcggtaagttttttttgtaaatttgtaatttgttgtttatcttgtttagctaaagccattgaaaattgttgcttcaaagcctcagctgattcagtggatattgattgatgagaagacggattagctattacaccttgttgaacaccaataaatgatgctaatccaattaacacagaatgaaaactaattttcatatataaacctcatttaactgatattttatcaagctaaaataccgctatacgcgtaaatttgacctaaaacagctggatgcctcgtattatatcgtaaaacaaaataaattgtgaatgataattaaaaggaatacaacctactttatgcatacaaaacttgcaattttgcttgaaaagtataaaattcgcaggctttttgtctatatatacagagaaaaaagtaagctatattctcaaatcactttcgaatttgagaatattcttttagtaattaaacatttagaggaaggttatggtaaccattcgtttatctcgtggcggagctaaaaaacgcccattttatcaaatcgtagtcgctgacagtcgttcacctcgtgacggtcgcttcattgaacgtgtaggtttcttcaatccaattgcacaaggtaatgcagaacgtcttcgcattaatcttgagcgtgtaaatcactgggttgctcaaggtgcttcactttctgatcgtgttgcgagcttggtaaaagaagcacaaaaagcagcataattttgctttttgatttagttctcaaactaagataggtgaaaaatatggaacaacaacatattgaagttgtgggcaaattaggctcaacctacggtattcgtgggtggttgcgtatttattcatcaacagaacaagctgaaagcatttttgattatcaaccttggtttttaaaaatcaaaggcgaatggcaatcaattgaattagaaaactggcgttatcataatcacgaaatcatcgttaaattaaaaggcgttgatgaccgtgaagctgcacaaattttagcgaatgttgaaattggtgtagatttatctgttttcccagaactagaagagggcgattacaagcataaaaccgtggacgatcgcccttatggtggtggcccaggaatgctaatgatggtgcaacctttacgggatgcgattcatactgcaaaagctgcggcaggagaaggcgcaaaggtgatttacctttcgccacaaggacgtaaactcgatcaaggcggcgtaaccgagcttgctcaaaatcagaaattgattttagtatgtggacgttacgaagggattgatgaacggttgattcaaactgaaattgatgaagaatggtcaatcggcgattacgttctgaccggtggggaattgccggcaatgacattaattgatgctgttgcacgttttattcccggtgtattaggcaaacaagcctcggcagaagaagattcttttgcagatggtttattagattgcccgcattacactagaccagaagtgttagaaggattaactgtaccacccgtgctgatgtcgggacatcacgaagaaattcggaaatggcgattaaaacaatcgctacagagaacgtggctccgacgccctgagctcttagaaggcctagctctgactgacgaacaacgtaagctgttaaaagaggcgcaagccgagcataacagttagtttcagttacatctaggatcaataaaggatcaaacaatgtctaacattatcaaacaacttgaacaagaacaattaaaacaaaacgtacctagcttccgcccaggtgatactttagaagttaaagtatgggtggttgaaggtagcaaacgtcgtttgcaagcattcgaaggcgtggttattgcaattcgtaaccgtggcttgcactcagcatttactttacgtaaagtatctaacggcgtaggcgttgagcgtgtattccaaactcactctccagctgtagattctatcgcagttaaacgtaaaggtgcggtacgtaaagctaaactttactacttacgtgaacgttcaggtaaatcagctcgtattaaagagcgtttaggcgcataattcattatatttaatgataatctaaaaaaccttgggatattccaaggttttttgctatgtggatcatggtaatttaattaatcattagggaggatcgattaaaattccttattttacttcaacaacgatatcggattctgatttaggtttcaatttacccacttcatataaatcaatccccgcatctttggctatgtcaattactgtttgaacgctattaagctcaactgccactaataagccgcctgatgtttgaggatcacacaaaatcgctttttgttcttccgtcaatatcccaactttatgtccataactgtcaaaattacgccctgttccacccggtacgcaaccttgagcaatataatcttttacaccgtccaaggttttaattttgtccgaaaaaactaccgcacttagatttgaaccttcacagatttcaattaaatgaccaagtaaaccaaatccagtgacatccgtcattgcggtgacgccatccacttgggaaaattgactaccaatagaattcatttggcacatagcggcagtggctaaaccttgatgttctggttttagttttccttttttttccgccgtcgtcaaaataccaataccaagcggtttcgtcatataaagcttacaacctgattttgcagaagcattacgtttcactttttcagtgtcaatcacgcctgtcacggctaaaccaaaaataggttcaggcgaatcaatggaatgtccacccgccaaagcaatccccgcttgatggcaagcaaaacgcccaccatcaacaattttctgtgcaacttctgcaggtaatacattggttggaaaacctaaaatagcaattcccattatcggcttaccgcccatagcaaaaatatcactgatggcattggtcgcagcaattcgtccaaaatcaaaa

SEQ ID NO: 365 - DNA, 2880 bp, ARTIFICIAL
  Sequence of the rpL1 and rpL11 genes and flanking regions.
tgcctggcgatccacttcgtgcaaaatatattgcagaaacttttttacaagatgttgttgaagtaacgaatgttcgtaatatgcttggttttactggaacttataaaggtcgtaaaatttctattatggggcacggtatggggattccatcttgctctatttacgcgaaagaattaatcactgaatatggcgtgaaaaaaattatccgtgtaggttcttgtggcactgttcgtatggacgtgaaagtgcgcgatgtgattatcggtttaggtgcatgtactgattcaaaagtaaaccgtattcgtttcaaagataacgactttgcagctattgctgactttgatatggcacaagccgctgttcaagctgcaaaagcaaaaggtaaagtcgttcgtgtaggtaatttattctcggcggatttattctatacacccgatgtggaaatgttcgatgtaatggaaaaatacggcattttaggtgtggaaatggaagctgctggaatttatggtgtggctgcagaatatggtgcaaaagcattaacgatttgtaccgtgtctgaccatattcgtactcacgaacaaaccacggcagaagaacgtcaattaacattcaatgatatgattgaaattgcgttagattcagtattaattggtgatgcactataatatcttctatcggatttaagaagtgcttgaaaaacaaccgcactttttatataatccgtgcccattatgagccgtttgtggctcatatttttgtgtggtgcaatgaatcttgcactaaaaattatcggggagctatttaatagcgttattacccaattagaggaaaactaaaatggcaaaaaaagtccaagcctatgttaagttgcaagttgcagctggtatggctaacccatcaccaccagttggtcctgcattaggtcagcaaggtgtgaacattatggaattctgtaaagcattcaacgctcgtactgagagcttagaaaaaggtttaccaattccagttgttatcactgtatatgcagaccgttcatttactttcgtcactaaaactccaccagcagcagtattattgaaaaaagctgcaggtatcaaatctggttctggtaaaccgaacaaagataaagtgggtaaagtaactttagatcaagttcgtcaaatcgctgaaactaaagcagcagatatgactggtgcgactatcgaaacgaaaatgaaatcaatcgctggtactgctcgttcaatgggcttagtggtggaggaataatacgatggctaaattgactaaaaaaatgaaagcaatcaaagctggcgtagattctactaaagcatacgaaattaacgaagcgattgcggtattaaaacaattcgcaacggctaaattcgttgaaagtgttgatgttgcagtaaacttaggtatcgatcctcgtaaatctgaccaaaacgttcgtggtgcaactgtattaccacacggtactggtcgtgaagtacgtgtagctgtgttcactcaaggtgctaacgcagatgcagctaaagaagctggtgctgatttagtaggtatggaagatttagcagagcaaatcaaaaaaggcgaaatgaactttgatgttgttatcgcttctcctgatgcaatgcgtgttgttggtcaattaggtcaagtattaggcccacgtggtttaatgccaaaccctaaagttggtactgtaacaccaaacgttgctgaagcagttaaaaatgctaaatctggtcagatccgttatcgtaatgataaaaacggtatcatccacaccactatcggtaaagcaaacttctctgaagttcaattaaaagaaaatcttcaagcattattggctgctttaaataaagcaaaaccaactactgctaaaggtattttcatcaagaaagtaagcatctctaccactatgggtgcaggtgttgctgttgatcaagcttctttataatttaaagaattgatagattttaaaccgcactttttgaaagtgcggtttttttgtttcataaaatttctatataagttttaaacttgacgagaaagctgcattcatttaaaatttaccgccttaaaattagcaaagatttagattgatttttaatcaatcttgaccttttattgcttaatttaaccgtgtttttgatagaaagcacatccacacaatgacaaattcaccgttatttgtcgttgttttgctcaagttgtcgttctatgtaatttgagttgtcaccccactatagaagtaaggttcagagtgcggtcattttaacggtcattcacgtcacagttagtttgtggctaggtcactgaacagttagcagaggaaaaccaatgggttactcctattctgaaaaaaaacgaattcgtaaagatttcggtaaacgtccgcaagttttaaatgttccttatttattaaccattcagttggattcttttgataaatttattcaaaaagatcctgaaggtcagcaaggtttagaagcggcattccgttctgtatttcctattgtaagcaataatggctatacagaattacaatatgtagattatcgtttagaagagccagagtttgatgtacgtgagtgccaaattcgtggctcaacttatgcagcaggcttacgtgtaaaattacgtttagtgagctacgataaagaatcttcttcacgcgcagttaaagatattaaagaaaatgaagtttatatgggggaaatcccattaatgactgataacggtacttttgtaattaatggtaccgagcgtgttatcgtttcacaattacaccgtagtccaggtgtattctttgattctgacaaaggtaaaacccattcttcaggtaaagtgctttataacgcacgcattattccttac

SEQ ID NO: 366 - DNA, 2000 bp, ARTIFICIAL
  Sequence of the rpS21 genes and flanking regions.
ttacatttaatggcaagagtatccaccaccgcatcttggaaagcataagcaatatctgctttagtttgctctatcagttcgccctcgtttttaattgcttgattaactgtatttgcggcaaatgtttttaaaccagaaaaactaaaatcaaggcctgcacgatctgtcattggacgtggaaatgtgaaacgatttggcgtacctttttccgctaaacgagaaagtgccgcgccacctggataatctagtccaagtaattttgctgttttatcaaaggcttcgccagcagcatcatcaatagattctcctatcacttcatattttcctacaccatcgacacgcactaattgagtgtggccacccgataccaacagagcaacaaaaggaaagtgcggtgaattgtcatcaagcattggcgcaagtaaatgcccttccatatgatgaacaccaatcgcaggaacattccaagcataggctaaagaacgtgcaatcgtagcaccgacaagcaatgcgccaacaagcccagggccactcgtataagcaataccatcaatatcgctcgcggttaaattggcttcctctaatgccgctttaataagaggtgctgttttccgaatatgatcacgtgatgctaattcaggaaccacaccaccataatctgcatgcagggcaatttgagtataaagttgattagcaattaatcctttttcttcatcataaatcgccacgcccgtttcatcacaggaagtttcaatgcctaagattttcattgattttcttaatttattacctaaaatgttgcgcgattttaccctgtttaagcggttttaaccagttgaaaccacaaatattaaggtgaattggcattctatcctttactttttccctaaaaatagattagaattgcgtcctttattaaatttgtcatttacacacaggtgctttggcaaaaataaaattttaaattgcaattaaattaaactcattgaggtgattggcttatgcctgtaattaaagtacgtgaaaacgaatcatttgacgtagctttacgtcgtttcaaacgctcttgcgaaaaagcgggaatcttagctgaagtacgcgctcgcgaattttacgaaaaaccaactacaattcgtaaacgtgaaaatgcaacacttgcaaaacgtcacgcaaaacgcaacgctcgcgaaaacgcgcgcaatacccgtttatactaatttatagtattttctgactcgagttaagacaaaccgtgaatcctttggactcacggttttgttactttaagcacaacaaaaatctacgccaaaaacgaccgcactttcacaccacgatcacggaggctcgacaatgaaaggttctattcctcgcccctttattgatgatttgctgacaaagtccgatattgtcgatgtgattaacacgcgcgtaaaactaaaaaaagctggccgcgattatcaagcctgctgccctttccatcacgaaaaaacaccatccttcacagttagccaaaagaaacagttttatcattgctttggttgtggcgcacatggtaatgcgatttcctttttaatggattatgacaaacttgaatttatagaggcgattgaagaacttgcagcaatggcagggcttgaaataccttacgaaaaacgcgttaatcacagcggaaaacctcaagctaattaccaaaccaaacgaaatctctatgaattaatgcaagagattgccacgttttatcaaaaccaattaccattaaatactcaagcacaagaatatttacaacaacgtgggctttcacctgaaattattgagcgtttccaaattgggtttgtgccgaatgcaatggatactgtactgcgtaaatttggtgttaatcgtgaagaacaacaaaaactcattgagttaggcatgctttctcgaaatgatcgtggcaatatttacgataaattccgaaatcgcatcatgtttccaatccgcgataaacgtggtcgcacagt

SEQ ID NO: 367 - DNA, 3200 bp, ARTIFICIAL
  Sequence of the rpS6 and rpS18 genes and flanking regions.
aaagcgcaccaaaatcaaattgcatcgcatccgtttcaataacggtgagcttttgatgtaaaaatggatggtgacgtaaacgttctgcaaggtctcggtcaagctctaccacagtcagatgatcgacaagttcaccaacaggctctgttaatgcaccaagccctgggccaatttccactaagaattgattaggttgtgggtaaatcgccgccacgataccttgaatgacagaagtatcatgtaaaaagttttgaccaaagcgtttacgcgccgtatggcctaagtgtttttttgagttcataagtactatttaataagaaaagtgcggttattataggggttgttttagctttgtaaatcattgttaggttatgccaaattgagtttttcatgaacaatattattttttctttcgtagaaagctaaaaacggctataatccgcccgtttttcttaacttttccgcctaaagtgcggataaaaaatcgattatttttagaggatacaatggcgaaagaagattgcattgagatgcaaggcacaattttagagactttaccgaatactatgttccgcgtggagttggaaaacggtcacgtggttactgcacatatttctggaaaaatgcgtaaaaactatatccgtattttgactggggataaagtgactgtagaaatgacgccttatgatttaagtaaaggacgtattattttccgtagtcgttaattacagaagatttgagataggtcgatattgttacaatatcgaccttcttttttgttcaaaaagaactcaaactggttgcggagcgtwaaaaaatcggtataatccgcaacccttagccacattgaatttttcgttccttgcctttgcagattggtggctgatctacgtcaaaggctgattaacccgtaaggagcagtaatgcgtcactacgaaatcgtgtttatggttcatccggaccaaagcgagcaagtaccaggtatgatcgaacgttacaccggttctgtaaaagaagctggtggtcaagttcatcgcctagaagattggggtcgtcgccaattagcgtacccaattaataaattacacaaagcacattatgtgcttatgaatgtagaagcgcctcaacaagtcatcgacgagctagaaacgactttccgttataacgatgctgtattacgcagtcttgttatccatactaagcacgccgtaaccgaagcgtccccaatgaaagcggctaaagaagaacgtaaacctttagctgaagttgaaaacaacgattttgaggatgctgaagagtaatttgaaaattgataatagtttttcggttatgggagtcgtttctcggttaccaaagcgattaaagagccctagtggaattgagcattgcaagtttttgttagaacatcgttctgatcagattgaaagtggtttcacacgtcaagcttggttaaaaatgcctgttcaaattagtggtaatcaattgatagaaaaaactcaaagcattacggtcggtagtaaaattttggtggtgggatttattacatcacataaaacccaaagtgggttatgccaattagttttacatgccgagcaaatcgaatttatagattaggagactagccaaatggcacgttatttccgtcgtcgtaagttctgccgtttcacagcggaaaatgttgttgaaatcgattacaaagatatcgctacattaaagaactatatttcagaaagcggcaaaattgtacctagccgtattaccggtactcgtgcgaagtaccaacgtcaattagctcgtgcaatcaaacgcgctcgctatttagcgttacttccatacactgacaatcatcagtaattaaggagacacggtaatgcaagtaattcttttagataaaattgttcacttaggtcaagtgggcgatcaagtaaatgttaaatcaggttttgcacgtaacttcttaatcccacaaggtaaagctgttatggcaactaaagctaacattgaacactttgaagcacgtcgtgcagaattagaagcgacagcagcagcaaatcttgcagcagctcaagctcgtgcagcagaagttactgcattaggttctgtgactatcgcatctaaagcaggtgatgaaggtcgtttattcggcgcaatcactactcgtgatgtggcagaggcagtaactgcagcaggcgttaaaattgcgaaaagtgaagttcgtttaccaaacggtccaatccgtactcttggtgaccacgatgttcgtttccaacttcacggtgaagtatttgcggcattagatgtaatcgttgttgcagaataatttatccaatagataaaataaaacccagtttaaaactgggtttttttatttttatcatatataaatttagaatagggtaataaaaaatatcccttattttagtagatttgagccctaagtcatatagggctcaaattttctgttgggatagattttttactcgtataagcgaattacatcattccgcccattccacccataccgcccattccagcagcacctaaatcggctttatcatcttttggaagatcagttaccatacattcagtggtaatcattaagcctgctacagaagctgcgaattgcaatgcagaacgagtgactttagttggatctaagatacccatttcgatcatatcgccgtactgttctgttcctgcattataaccaaagtttccttcgccatttttaaccgcacttgccacaactgaagcttcttcacctgcgttagtgacgatttgacgtaaaggcgcttccatagcacgtaatgcaagtttgatacccacattttgttcttcgttgtcaccttttaggcttgctgcaactttcgctgctgcgcgaactaatgcaacgccaccaccagcaacgataccttcttcaaccgctgcacgagttgcatgtaatgcatcatctacacgatcttttttctctttcatttcaacttcagttgctgcgcccactttgattactgccacaccgcctgctaatttagccacgcgttcttggagtttttctttgtcgtagtcagaagttgattcttcgatttgctgacgaatttgagccacacgacctttgatttgtgcttcatcgccgataccatcaataatggttgtgttatctttattgataacaacacgttttgcttgacctaaatcttcca

SEQ ID NO: 368 - DNA, 2800 bp, ARTIFICIAL
  Sequence of the rpS7 and rpS12 genes and flanking regions.
aactaaatcaatttctggtctatttttcgcaggtcaaattaacggtacaactggttatgaagaagcagcggcacaaggtttattggctgggattaacgcaggtctttatgttcaagagaaggatgcatggtatccacgccgtgatcaatcttatactggcgtattggtggatgacctttgcacacttggtaccaaagaaccgtatcgcgtatttacttctcgtgcagaataccgtttgttactacgtgaagacaatgcagacattcgtttaacaccaattgcccatgaattaggtttgattgatgaggctcgctgggcacgtttcaatcaaaaaatggaaaatattgaacaggaacgccaacgtttacgcagcatttggttgcatcctcgttcggaatatttagaagaagcgaataaagtgcttggtagtccacttgtacgtgaggctagcggtgaagatttattgcgtcgtcctgaaatgacctacgatattttgacttctttaacgccatataaaccggcaatggaagataaggaagctgttgagcaagtagaaattgctattaaatatcaaggctatatcgagcatcaacaagaagaaatcgaaaaacaaaaacgccatgaaaatacggctattccagctaactttgattatagtaaagtttccggtttatctaatgaagtacgtgcgaaattggaacaacatcgtccggtttccattggtcaagcgagccgaatttcaggtatcacccctgcagcaatttcaattattttggtaaatttgaaaaaacaaggaatgctaaaacgtggggaataaagttttttataaaaaaacaaaagtgcggtaaattttaatctagttttaatcctagagcatattgtttaattattgacaataaagcgtaaaactattagaattcgccgtctatttctatatagaagtagattttttgaacaacattctattcttgaataacatttaaactggagcttttttaatggcaactatcaaccagctagtacgcaaaccgcgtgtgaaaaaggttgtaaaaagcaacgttcctgcattagaggcttgcccgcagaaacgtggtgtatgtactcgtgtatatactacaactcctaaaaaaccaaactctgcgttacgtaaagtatgtcgtatccgcttaactaacggttttgaagtaacttcttatatcggtggtgaaggtcataaccttcaagagcacagtgttgtattaatccgtggtggtcgtgttaaagacttaccgggtgtgcgttaccacacagtacgcggtgcattagactgcgcaggcgttaaagatcgtaaacaaggtcgttctaaatacggcgttaaacgtcctaaagcttaatggttctccgttaagtaaggccaaacgtctaaattagcaaaacaatttaaaccataaactccagtcaaaagcgctttgcgctgcaaattttctcaatgagaaatattgctgatgggttttggatatcctgaagattaaaatacggagaaattcgcaatgccacgtcgtcgtagtgttgaagcacgcaagattcttccagatccgaagttcggttcagaattacttgcaaaatttattaatgtaatcatggtagacggtaaaaaatccgttgctgaatcaatcgtttatggtgctttagaaactttagcacaacgcacaggtaaagagcctttagaagcgtttgaagttgcacttgaaaatgtacgtccaactgttgaggttaaatctcgtcgcgttggtggttctacttaccaagtaccagttgaagtgcgccctgtacgtcgtaacgcattaggtatgcgttggatcgttgaagcagcacgtaaacgtggtgataaatcaatggctttacgccttgcgaacgaattatctgatgcttcagataataaaggtgcagcagtgaaaaaacgtgaagacgttcaccgcatggctgaagctaacaaagcatttgctcactaccgttggtaataagtttttgaatttaaagggcttcatcgttgatgaagccttacccttatataaactgatattaaataaacaaggttataataatggctcgtacaacccctattgaaagatatcgtaatatcggtatcagtgcgcatattgatgcgggtaaaactactactactgagcgtatcttattctatactggtgttagccacaaaatcggtgaagtgcacgatggtgcagcaacgatggactggatggaacaagaacaagagcgtggtatcaccattacctctgcggcaacaactgcattctggtctggtatgtcacaacaattcccacaacatcgtatcaatgttattgatactccgggacacgtggactttactgttgaagtagaacgttctatgcgtgttcttgatggtgcggtaatggtttactgtgcggttggtggtgttcaaccacaatctgaaaccgtatggcgtcaagctaataaatatgaagttccgcgtattgcgtttgtaaataaaatggaccgtactggtgctaacttcttacgtgttgttgaacaattaaaaactcgcttaggtgctaatgctattcctcttcaactccctgttggtgcagaagaaaacttcacaggtgtagttgatttgatcaaaatgaaagcgatcaattggaatgaagcagaccaaggtatgactttcacttatgaagaagtgcctgctaatatgcaagcagactgtgaagaatggcgtcaaaaccttgttgaagcggcagctgaagcgtcagaagaattaatggaaaaatacttaggt

SEQ ID NO: 369 - DNA, 2880 bp, ARTIFICIAL
  Sequence of the rpL10 and rplL7/12 genes and flanking regions.
caatgcgcatttatcggcatatcctaatattgattggcataaattcagcgaagaatttgtcacttcattaggtattcaatggaatccttataccacacaaattgagccgcacgattacatcactgaattttttgatgctgtagttcgctttaataccattatcattgattttgatcgtgatttatggggatacattgcattaaatcactttaaacaacgaacgattgcaggcgaaattggttcttctaccatgccacacaaagtcaatccaattgattttgaaaactcagaaggcaatctaggattagccaatgcagtgatgacccatttaggtcaaaaattaccaatttctcgctggcagcgtgacttaacagattcaactgtattacgtaatttaggcgtaggattaggttattgtttgatcgcttatgcttcaacacgcaaaggcatcagtaaacttgaagtaaatcaaccgcacttattagaagaactcaatcaaaactgggaagttttggctgaaccaattcaaaccgtaatgcgccgctatggaatagaaaaaccttacgaaaaattaaaagaattaacgcgaggtaaacgagtgacagaacaggctatgcgtgaatttattgataagttggatattccacaagaagaaaaattacgtttacaaaaattaacacctgctacttatattggggctgcagtggaattagtagaaaaactatcataggaatttggctcttttttcaacaatattctttacaagaacatagcttttctctataatcctgcgcctgtgttagtcaatctaacaaatttctggttggtgcttgacctattcaagccccatccaagaccgtaggggagtaatcttaattatcctacgtagatggtgaacagaataagaatttttcttgcttctgggcgccgaagtcatcctagtcttaggattaggtaaattaattccgagtaatcggagtgtattcaggagctaaaagccaatggcattaaatcttcaagacaaacaagcaattgttgctgaagtaaatgaagcagccaaaggtgcactttcagcagtaatcgcggattctcgcggtgtaactgttgagaaaatgactgaattacgtaaatcagcacgtgaagctggtgttacaatgcgtgtagttcgtaatactttattacgtcgcgcagttgaaggcacagattacgaatgcttaaaagatacgtttgtaggtccaacacttatcgcgttctctaacgaacacccgggcgcacgtgctcgtttgttcaaagagtttgctaaagcaaacgataagtttgaaattaaaggtgcagcctttgaaggtaaaatccaagatgttgaattcttggcaacattaccaacttacgaagaagcgattgcacgtttaatgggcacaatgaaagaagctgcagcaggcaaacttgctcgcaccttcgcggcattacgcgacaaattacaagaagcagcttaattattaagcgtttcttacttcatctaactttatttattttaggaattgattgttatgtcattaactaacgaacaaatcattgaagcgattgcttcaaaaactgtaactgaaatcgttgaattaatcgcagcgatggaagaaaaattcggtgtttcagcagcggcagcagtagcagcagctccagcagcaggcggtgcagcggcagcagaagaaaaaactgaattcgacgttgtacttaaatctgcaggtgcgaacaaagtagcagtaattaaagcagtacgtggtgcaactggtttaggcttaaaagaagctaaagatttagttgaatctgctccagctaacttaaaagaaggcgtttctaaagaagaagctgaagcacttaagaaagaattagaagaagcgggtgcagaagtagaagttaaataatttctattttaaccactttaaaattcaaaaaaccgatgggaaaccatcggttttttcttatataaaagtttgttatagtttttacttaaaaacttaccatttgctatctttctaagatagaatattacccgttgttattgatgaataaagagaaaatttatgacaaaaaaagcattaagtgcggtaattttagcagctggaaaaggaacgcgtatgtattctgatttacccaaagttctacatacaatcgcgggtaaaccaatggtaaaacacgtgattgatactgcccatcaattaggctcagaaaatattcatttaatctatggtcacggtggggacttaatgcgtacccatcttgcgaatgaacaagtaaattgggtattacaaacagaacaacttggcacagcacatgcagttcaacaagcagcacctttctttaaagataacgaaaacattgttgtgctttacggcgatgcaccattaattactaaagaaacattagaaaaattaattgaagcgaaaccagaaaatggcattgcattgcttaccgtaaatttagataacccaacaggctatggacgaattatccgtgaaaatgggaacgttgtagccattgtagaacaaaaagatgcgaatgctgagcaactaaatattaaagaagtcaatactggcgttatggtatctgatggtgcaagtttcaaaaaatggctagctcgtgtaggcaataataatgctcaaggcgaatattacttaacggatcttattgctctcgcaaaccaagataattgtcaagttgttgctgtacaagcaacagatgtcatggaagttgaaggcgcaaataatcgcttacaattagccgcacttgaacgttatttccaaaataaacaagcctccaaattattacttgaaggcgtaatgatctacgatcccgctcgttttgacctacgtggaacattagagc

SEQ ID NO: 370 - DNA, 6702 bp, ARTIFICIAL
  Sequence of the rpS10, rpL3, rpL4, rpL23, rpL2, rpS19, rpL22, rpS 3, rpL16, rpL29, and rpS17 genes and flanking regions
attaatttcattattaaagaaattggagcttatgctctaaagagtgaacttcttttagataaagttgatttagccgtgttgttatatcccgagcgaatatcaaaaaatattattgattcaattgaaattcatagttctgaattagccttatttctttcaccaaagcatgttttagcaaaaaaacaacaaatcacatgggctgatttacatcagcagaaaatggcaatttttgatcaaacatttatgattcatcatcatttgaaggaagcttttgagcgcaataattgttatccagatattgttttggattcgagttgttgggattttctgctaagtgcggtcaaaacaaacaaagaattattaactattctaccgttacctatggctgagctttatcattcaaaagaatttttgtgtcgtaaaatcgaaagtcctgttccgtggaaagtgacactatgtcgtcaaagaaaaacggtctacacacatcttgaagaatatatttttgataaattattagaggcttttagaccaacaaaatagttaaaataaaagcttgcaaatagggttgtctttctatagaatctacgagctctcaatatgagagccgtttaatgtaatcatttattgaacgggcatgacgatatgtcaggctaacaatgtttccgatttggagactatataacaggtaacttgcacctccttttctattttgaagttagaattgcgattggtgttagtttttttattagctaaattttattggagctctggtctaatgcagaaccaaagaatccgtatccgcttaaaagctttcgatcaccgtttgatcgatcaatctactgcggagatcgtagaaacagctaaacgtactggcgcacaagttcgtggtccaattcctttaccaactcgtaaagagcgtttcaccgtgttgatttctccacacgtaaacaaagacgcacgtgaccaatacgaaattcgtactcacaaacgtttagtagatatcgtagagccaacagaaaaaactgttgatgcattaatgcgtttagatttggctgccggcgtggacgtgcagatcagcctaggttaattaagaggttattacaatgattggtttagtcggtcgtaaagttggtatgacccgtatcttcaatgaagacggcgtgtcagtaccagttaccgttatcgaaattgaagccaaccgcgtaactcaagttaaaactcttgaaaacgatggctatactgcagttcaagttactactggttctaaaaaagcgaatcgtgtaactaaacctgaagcaggtcatttcgtgaaagcaggtgttgaagctggtcgcggtttatgggaatttcgtactgaaggtgaagaattcactttaggtcaagaaatcaatgtagacatctttgcagatgttaaaaaagtagatgttactggtacttctaaaggtaaaggtttccaaggtggtgttaaacgttggaacttccgtactcaagatgctacacacggtaactctttatcacatcgtgtacttggttctattggtcaaaaccaaacaccaggtcgtgtgtttaaaggtaaaaaaatggcaggacatttaggtgctgaacgtgtaactgttcaatcacttgaagttgttcgtgtagatgctgagcgtaaattgctattagtaaaaggttctgtacctggtgctatcaatggcgatgttatcgttaagccggcagttaaagcataagtctaggagatagagatggaattacaagttgtaggtgcaaacgcactcactgtttctgaaactaccttcggacgtgagtttaacgaagcgttgatccaccaagttgttgttgcttatgcagcaggtgcgcgtcaaggtactcgtgcacaaaaaactcgtgctgaagtgtctggttcaggtaaaaaaccttggcgtcaaaaaggtacaggtcgtgctcgtgctggtgatatcaaatcaccaatctggcgttctggtggtacaaccttcgcggctaaaccacaagatcacagccaaaaagtgaacaagaaaatgtaccgtggtgctatcaaaagcattctttctgaattagttcgtcaagaccgtttggttgtggtggaaaaatttgaattagatgcaccaaagactaaagttttagtacaaaaattaaaagatttagccgttgaagatgcgttaattatcacagcaagtttagatgaaaatctattcttagcagcacgtaacttatataaagttgatgtccgtgatgttcaaggtatcgatccagttagcttgatcgctttcgataaggtgattgttactgttgatgctgtgaaacaaattgaggagatcctagcatgagtcaagaacgtttgctaagtgtgctacgtgcaccgcacatctctgaaaaagcaactaacaatgctgaaaaatctaacactgttgtacttaaagttgctttagatgcgaacaaagctgaaattgctgctgcggttgctcaattatttgaagtaaaagtagattcagttcgtactgtggttgttaaaggtaaaactaaacgccgtggtaacaaaatgggtcgtcgcagcgactggaaaaaagcttatgtaactttagccgaaggccaaaacttggacttcgtggacagtgcagagtaatcggaggaaattagagaatggctatcgttaaatgtaagccgacctccgctggtcgtcgtcacgttgttaaaatcgtgaaccctgaattacacaagggtaaaccttacgcacctcttctagatactaaatctaaaactggtggtcgtaacaactatggtcgtattactactcgtcacattggtggcggtcacaaacaacactaccgtttaatagatttcaaacgtaacaagttagacattccagcggttgttgagcgtttagaatatgatccaaaccgttctgctaacattgctttagtgctttataaagacggtgaacgccgttatattttagcacctaaaggtttgtcagtaggcgatcaaatccaagctggcataaactcaccaattaaagtgggtaactcattaccaatgcgtaatatcccagttggttcaacagtacataacgttgaattaaaaccaggtaaaggcggtcaaatcgctcgttctgctggtgcttatgtacaaatcatcgcacgtgaaggcaactatgtaactttacgtttacgttctggtgaaatgcgtaaagtattagctgaatgtgttgctacaatcggtgaagttggtaactcagaacatatgcttcgcgtattgggtaaagctggtgctaaccgctggagaggtattcgccctacagttcgtggtactgcaatgaacccagtagatcacccacacggtggtggtgaaggtcgtaactttggtaaacacccagtaactccttggggcgttcaaactaaaggtaagaaaactcgtcacaacaaacgtactgataaatatatcgtacgtcgtcgtggcaaataatagattaaattaaagaggattagccatgccacgttctctcaagaagggtcctttccttgacctacacttgttgaagaaggtagagaaggcggtggaaagcggggataaaaaaccaattaaaacttggtcccgtcgttcaatgatcattccatcaatgatcggattgaccatcgcagtccataatggtcgtcagcacgttcctgtttatgtatctgatgaaatgatcggtcataagcttggtgaatttgcaccgactcgtacataccgcggtcacgcggcagataagaaagctaagaaataagaggtaaagagatggaaactatcgcaaaacatcgttacgctcgcacttctgcccaaaaagctcgcttagttgccgatttaattcgtggtaaaaaagttgcgcaagcattagaaattttaactttcactaacaaaaaagcagcagctttagtgaagaaagttttagaatcagctattgcaaatgcagagcacaatgacggtgcagatattgatgatcttaaagttgctaaaatcttcgttgatgaaggtcctagcatgaaacgtgttatgccacgtgctaaaggtcgtgcagatcgtattttaaaacgtactagccacattactgtggttgtgtcagatcgttaataagtagaggaatagcaatgggtcaaaaagtacatccacatggtattcgcctaggtattgttaaaccttggagctctacttggttcgcgaatacacaagacttcgctgacaatcttgaaggcgatttcaaagtacgcaaattcttaaataaagaattagcaagtgcttcagtttcacgtattactattgagcgtccagctaaaagtattcgtgtaactattcacacagctcgtcctggtatcgtaatcggtaaaaaaggcgaagatgttgaaaaattacgtaacgcagtgtctaaaatcgctggcgttcctgctcaaatcaacattgctgaagtgaaaaaacctgaattagatgcgaaattagttgcagatagcatcgcttctcaattagaacgtcgtgtaatgttccgtcgtgcaatgaaacgtgcggtacaaagtgctatgcgtttaggtgctaaaggtatcaaagttgaggttagcggtcgtttaggtggtgcagaaatcgcacgttcagaatggtatcgtgaaggtcgcgtacctctacatactcttcgtgcggacatcgattataacactgcagaagctcacacaacttacggcgtaatcggcgttaaagtgtggatcttcaaaggtgaaattcttggtggaatggctgccgttgcgcaatcagaacaacaacctgccgacaagcctaaaaaggctcctcgcggtaaaggtcgtaagtaaggagaaacgctaaatgttgcaaccaaaacgtacaaaattccgtaaagttcacaaaggccgcaaccgtggtatcgcgagcggtactgaagttagtttcggtacttacggtttaaaagcagttggtcgttgtcgtttaaccgctcgtcaaatcgaagcggcacgtcgtgcaatgtcacgtgcagtaaaacgtcaaggtaaaatctggattcgtgtattcccagataaaccaattactgaaaaaccattagaagtccgtatgggtaaaggtaaaggtaacgttgagtactgggtagccttaatccaaccgggtaaagtgctttatgaaatggatggtgtgtctgaagaagtagcaagaaacgcatttgcattagcagctgctaaattgccagttaagaccactttcgtaactaagacggtgatgtaatgaaagctcaagatttacgtacaaaaagtgttgaagagctgaatgctgaattagtaaaccttttaggtgaacaattcaagttgcgtatgcagacagccaccggtcagcttcaacaaacccatcaggctaagcaagtgcgtcgtgatattgcacgtgtaaaaactgtattaaccgaaaaggcgggtgagtaatgactgataaaattcgtagcgtacaaggtaaagttgttagcgacaaaatggaaaaatctttcgttgttgctattgaacgtaaggtaaaacaccctttatatggtaaatttatccgtcgtacaactaaattacacgtacacgatgagaacaatgaagccaaagttggtgataccgtagagattcgcgaatgtcgccctctatcaaaaaccaaatcttggactttagttcgtgttgttgagaaagcagttattgcttaattaataacaaagagtaataaaataaaagccaatagtgtaaatctattggcttttttgtttttaaagtgcggttaaaattcaatgaattttaacccgcaccttttcttttaggtgttattgacataacacctaaacaaatactgaaaaaaatatttttaataatggtacttaagagaaatttctgaagatcttggttttgaatattctgatgagtggaatactcgttatttgggtcatagattaattaatttcatcaacggcgttgatacccgtaaagaaacgtcaaaattagcagaggataaattcccagaagaacttatcaatgatacagatactactgggaatatttctaatgaagattgggattggtggtgccatttatctgatacaatgaagtatatattgatacatgatcttccttatcaagaagaggagattggcatcacagagttttatgatgaaaatgatttggataccagaagcagatatatatgatcgagagacttttggaatcttattaggagaatatgtaacaggattatatttgttagatgatacttttatagagccagtgcttgataatataaatattcctaacaatgtttatagtacaaatatatttgctattcattatgttgcaaagcatattttgggtattaaagatctagataaacgtttaaaatctggtgatattgaattagttcgtgaattaggagaagtaacaattggtggtaaggagaagtatttttactcttttgcaactaaatattgtagtcatcataatccaattgctttcccaatttatgatagctatgtggagcaagttctcctctattttaataaagtagataaattttcagcctttaaaaggaaagatttaaaaaattacagaaaatttaaagaggttttgatagattttcaaagatttaacttaaaagaactcgatctgtatctttggcttttaggcaaggaaattt

SEQ ID NO: 371 - DNA, 5840 bp, ARTIFICIAL
  Sequence of the rpL14, rpl24, rpL5, rpS14, rpS8, rpL6, rpL18, rpS 5, rpL30, and rpL15 genes and flanking regions
agaaacgtcaaaattagcagaggataaattcccagaagaacttatcaatgatacagatactactgggaatatttctaatgaagattgggattggtggtgccatttatctgatacaatgaagtatatattgatacatgatcttccttatcaagaagaggagattggcatcacagagttttatgatgaaaatgatttggatacagaagcagatatatatgatcgagagacttttggaatcttattaggagaatatgtaacaggattatatttgttagatgatacttttatagagccagtgcttgataatataaatattcctaacaatgtttatagtacaaatatatttgctattcattatgttgcaaagcatattttgggtattaaagatctagataaacgtttaaaatctggtgatattgaattagttcgtgaattaggagaagtaacaattggtggtaaggagaagtatttttactcttttgcaactaaatattgtagtcatcataatccaattgctttcccaatttatgatagctatgtggagcaagttctcctctattttaataaagtagataaattttcagcctttaaaaggaaagatttaaaaaattacagaaaatttaaagaggttttgatagattttcaaagatttaacttaaaagaactcgatctgtatctttggcttttaggcaaggaaattttcccaaaatctaaaaactgatgaatttatctaaggtaagagaagagagcatttcattttttctgcagtttatttttcattcgataaatttttgagaggatgaggatatttttataattccaaaagtgcggtaaattttaactggattatttagtaaatagatcaataagaggaagctaaattatcattgcctttctctttttcttttgataaaatccgccgcctatctgccattctatctgaatagtgtggatgggttcgtcccgaaagggtgtttttttaatcttaacggagcactaatatgatccaagaacagactatgctggatgttgctgataattcaggcgctcgcagcgtaatgtgtatcaaggttctaggtggatcgcaccgtcgttatgctgcgattggcgacatcatcaaaattactgtaaaagaagcaattccacgcggtaaagtaaaaaaaggtgatgtattaaaagcagttgttgtgcgcaccaagaagggtgttcgtcgcccagatggctcagttattcgtttcgatggtaacgcttgtgtaattttaaataataacactgagcaaccaatcggtactcgtatttttggaccagtgactcgtgaacttcgttctgagaaattcatgaagatcatttctttagctccagaagtactgtaaggggaatgtaatgcctgctaaaatccgtcaaaatgatgaagtaattgtccttactggtaaagataagggcaagcgtggcaaggtaactaaagtgttaccaaacggtaaagtgtttgttgaaggtatcaacatcattactaaacatgaaaaaccagttcctgcattaggaaaggctggtggtttggtgaaaaaagaagctgcaattgacgcttcaaatgttgcgattttcaatcctaaaacaaataaagctgaccgtgtaggttttagattcgaagacggcaaaaaagtacgtttcttcaaatctaacaatgaaattatctaacaaactggagtaatgcgatggcgaaactgcatgattactacagagatcaagtagtaagcgaattaaaaaataaattcggctacaaatctgtcatgcaagtcccacgaatcgaaaagattaccctgaatatgggtgtgggtgaagcattgaccgacaaaaaattgctagacaacgcagtagcggacttagcagcaatcagcggtcaaaaacctttagtaactaaagctcgtaaatctgttgctggctttaaaatccgtcagggatatccaatcggttgtaaagtaacactacgcggtgagcgtatgtgggagttctttgaacgtttaattacaattgctgttccacgtattcgtgacttccgcggtttaagtgcgaaatcattcgatggtcgtggtaactatagcatgggtgtgcgtgaacaaatcatcttccctgaaattgattacgataaagtagatcgtgtacgtggtttagatatcactatcacaactactgctaagaatgatgaagaaggtcaagcactacttgctgcctttaatttcccattccgtaaataaggcaggttataatggctaaacaatcaatgaaagcacgcgatgtaaaacgcgttaaattggctgaaaaattctacgcaaaacgtgttgaattaaagaaaatcatttctgatgtcaatgcctctgatgaagatcgttgggatgcagtgttaaagttacaaactttaccacgtgattctagcccatctcgtcaacgtaaccgttgccgccaaactggacgtcctcatggcgttttacgtaagtttggtttaagccgaattaaggttcgtgaagctgcaatgcgcggtgaaatcccaggccttaaaaaagcgagctggtaatataccactttattttggaatcggagaaaaagtacaatgagtatgcaagatccaatcgcagatatgctgacccgtattcgtaacggtcaagctgcgaacaaagttgcaatcaatatgccttcttccaagctaaaagtggcaattgccaacgtattagctgctgaaggttatatcgaaagcgtaaaagttttagaaggtgctaaacctgaattggaaattactttaaaatatttccaaggcaaaccagttgtagaaagcatccaacgtgtaagtcgtcctggtcttcgtatttacaaacgtaaagatgaattaccaaaagttatgggcggtttaggtgttgcagttatttctacatctaaaggtgttatgactgaccgcgctgctcgtcaagcaggtttaggcggtgagatcatctgttatgtagcttaatagagaggtaggaaaatgtctcgtgttgcaaaggcacctgttaatattcctgccggcgttgaagttaaactcgacggtcagctattaacagtaaaaggtaaaaatggcgagttatctcgcaaaattcatgaatcagttgaagtaaaacaagataacggacaatttacgttcactccacgtgaaggttttgttgaagcaaatgctcaatcgggtactgcacgtgcattagttaatgcaatggttatcggtgttactgaaggtttcactaaaaaattagtattggtgggtgtaggttacagagctcaacttaaaggtaacgcaattgcattaagtttaggctattctcacccagtagagcacactttgccggtaggtattactgcagaatgtccatctcaaaccgaaatcgtgttgaaaggtgcagacaaacagttgatcggtcaagttgcagcagatattcgtgcttatcgccgtcctgaaccttataaaggtaaaggggtacgttacgctgatgaagtggtacgtatcaaagaggctaagaagaaataattaaggtaacactatggataagaaatcagctcgtatccgtcgtgcagctcgtgcacgtcatatgatgagagagcaaggtgtaactcgtttagttattcaccgcactccacgtcatatttatgcacaagttattgcaccaaacggttcagaagtgcttgccgctgcttcaactgttgagaaagcaattcgtgagcaagtaaaatacaccggtaataaagatgctgctgcagcagtaggtaaagctgttgcagaacgcgcattagcaaaaggcgttcaagctgttgcttttgatcgttccggttttaaatatcatggacgtgtccaaactttagcggacgctgcacgtgaagctggtctacagttctaatgaggtaaattgagatgtcaaacatcgaaaaacaagttggtgaactgcaagagaagctaatcgcagtaaaccgtgtatcaaaaactgtaaaaggtggtcgtattatgagtttcactgcattaacagtggtgggcgatggtaatggccgagtaggttttggttatggtaaagctcgcgaagttccagcagcgatccaaaaagcgatggaaaaagcacgtcgcaatatgattaatgtcgctttaaatgaaggtacattacaacatccagttaaaggtgttcatactggttcacgtgtatttatgcagccagcaagtgaaggtacaggtatcatcgctggtggtgcaatgcgtgcggtattggaagttgcaggtgtacgtaacgttctttctaaagcgtatggttctaccaacccaattaacgttgttcgtgcaactattgatgcattagcaaatatgaaatcaccagaaatggttgctgcaaaacgcggtaaaactgttgatgaaatcttggggtaatgaataatggctaaaactattaaagtaacacaagttcgtagctcaattgctcgtttaccgaagcataaagctaccttgcgtggtcttggtcttcgccatatacaccacactgttgagttaattgatacgcctgcagtacgtggtatgattaaccaagtttcatacatggttaaagtggaggagtaagagatgcgtttaaatactctatctccggctgaaggtgcaaagcatagtgctaaacgcctcggtcgtggtattggttcaggtttaggcaagactggtggccgcggtcataaaggtcaaaaatctcgtactggtggcggtgttcgtcgcggtttcgaaggtggtcaaatgccgttataccgtcgtttaccaaaatttggttttacttcaatgaaatctgcagtgactgcagaagttcgtttaaatgaattaaccaaagttgaaggtaatgtagtaactttagaaacattaaaagcagcaaatatcttaactaaagatatccaattcgctaaagtaattttagctggagaagtgaaatctgcagtaacggtacgcggtttacgtgtaactaaaggtgcaaaagcagcaattgaagctgctggcggttcaattgaggaataattagcaaatggctaaacaaccaggttatcaagcaagaagtactaatagcggtaaaggtgaattaaaaagccgattacttttcgttttaggtgcacttatcgtttatcgaattggttcattcattccggttcctggtattgatgcggctgttctagctcaattagttgaacaacaaaaaggcactatcattgacatgtttaacatgttctctggtggtgctctaagccgtgcatccattttagcattaggaatcatgccatatatatcggcatctattgtaattcaattgcttgcaacggtttctcctgctttagcagaattaaagaaagaaggtgctgctggtcagcgtaaaatttctaaatatactcgttatgcgacagttgtttttgcaacgattcaggcagtagctatttcaacaggcttaccaaatatgttgtctggcttagtgccaaatgttggatttagtttttacttcacttcagttgttagtttagtcactgggacaatgttccttatgtggttgggtgagcaaataactgaaagaggtattggtaacggtatttcaattcttgtttttggcggtattgtagctggtttaccatcggctattcttcaaactattgagcaggctcgtcaaggacagatgcatccattagttcttcttctgatcgcagctattgtatttgcagtaacttattttgttgtttttgttgaaagaggacaacgtagaattcgcgttgaatatgcgaagcgtcagcaaggtcgtcaaattttaggtggtcattca

SEQ ID NO: 372 - DNA, 4720 bp, ARTIFICIAL
  Sequence of the rpL36, rpS13, rpS11, rpS4, and rpL17 genes and fl anking regions
ttgttgaaagaggacaacgtagaattcgcgttgaatatgcgaagcgtcagcaaggtcgtcaaattttaggtggtcattcaacacatttaccattgaaagtgaatatggcaaatgtaatgccagcaatttttgcttcaagtattattttattcccagctacattaacacaatggtttgggcaaaatgataaatttgaatggttaaataatttatcaatgttattgaatcctggtcaaccactttatttgcttgtttatgctgttgcaattattttcttcagctttttctatacagcaatgcaatataatcctcgtgatacagcagataatctaaaaaaatctggtgcatttattccaggaattagacccggtgaacaaacatcacgttatattgataaagtgatgactcgtcttacattaattggcggtctctatgtaacgtttgtatgtttagttccttatattatgacatcggcttgggatgttaaattttacttcggtggaacatctcttttaattgtagtcgttgtaattatggatttcatcgttcaggttcaaagtcatttaatgtcttctcaatatgaatctgcgttgaaaaaagcaaaccttaaaggttttggacaataattgttcatttaaagtaaaaggataagcaatgaaagttcgtgcttccgtaaagaaaatgtgtcgtaactgtaagattgttaaacgtgagggtgttgtacgcgtattgtgtagcgaccctaaacacaaacaacgtcaaggttaattaacatttttcttgccaagaaccagttgagtagttatactgctcaactcatttatgtccttgatattctgtttgagtatcctgaaaacgggcttttcaagatcagaatatcaaattaattaaaatataggagtgcatagtggcccgtattgcaggcattaacattcctgatcataaacacgctgtaatcgctttaactgccatttacggtattggtaaaactcgttcacaagctatttgtgcagcagcgggtattgctgaagatgttaagatcagagaattgtctgaagagcagattgacaaactgcgtgacgaagttggtaaatttaccgttgaaggtgacttacgtcgtgaagtaacactaaacatcaaacgtcttttagacttaggatgctatcgtggtttacgtcatcgtcgtagtttaccagtacgtggtcaacgtactaaaactaatgcgcgtacccgtaaggtccacgtaagccgatcaaaaaatagtcggggtaaataagaatggctaaaacaccagttcgtgcacgtaaacgtgtaaaaaaacaagttgtagatggcgtacgacatattcacgcatctttcaataatacaatcgttactattactgaccgtcaaggtaatgctctagcttgggcaactgcaggtggttcaggtttccgtggttctcgtaaatcaactccgttcgcagcgcaagttgcggcagagcgttgtgctgaaatcgttaaagaatttggcttaaagaacttggaagttatggttaaaggtccgggtccaggtcgtgaatctacaattcgtgcgttaaacgcagcgggtttccgtatcacgaatattactgatgtgactccgattcctcataacggttgtcgtccaccgaaaaaacgtcgtgtttaagacgtataggatagttggagaaagaaaatggcaagatatttgggtcctaaactcaagctcagccgtcgtgaaggcactgatttattccttaaatcaggcgtgcgtgcgattgattcaaaatgtaaaattgatacagcaccaggtcagcacggtgctcgtaaaccgcgtttgtctgactatggtagtcagttacgtgaaaaacaaaaagttcgtcgtatctatggtattttagaacgtcaattccgtaactactataaagaagcaaaccgtttgaaaggtaacactggtgaaaatttattagtgttattagaaggtagattggataacgttgtttatcgcatgggatttgctacaactcgcgcagaggctcgtcaattagtgagtcataaagcaattgttgtgaatggtcgtgttgttaatattccatctttccaagtttctgtaaatgatgtagttgctattcgtgaaaaatcgaaaaaacaagctcgtattaaagcatcattagaattagcagagcaaagagaaaaaccaacatggttagaagttgattctgcaaaaatggaaggtgtattcaaacgtgttcctgaacgttctgatttatcagcagacattaacgaacatctgatcgttgagctttactctaaataatagttaagcttaaaaccaaagagaggataaaatgcagggttctgttacagaatttttaaaaccacgtttagtagatattgaacaaattagttcaacacatgctaaagtgatcttagaaccgttagagcgtggttttggtcatactctaggtaatgcattgcgtcgtatccttctgtcttcaatgccaggttgtgctgtaactgaagtagaaattgatggcgtattgcatgaatatagtagtaaggaaggtgttcaagaagatattcttgaagtacttttgaaccttaaaggtctagcggttaaagtacagaataaagatgacgttattctgacattaaataaatctggaattggccctgttgttgcagcggacattacctatgatggtgatgttgaaattgtaaatccagatcatgtgatttgtcatttaactgatgaaaacgcttcaattagtatgcgtatacgtgttcagcgtggtagaggatatgttcctgcttcatctcgtacacatacgcaagaagaacgtccaattggtcgtttgcttgttgatgcttgttatagtccggttgaacgaattgcgtataatgtagaggcagctcgtgttgagcagcgtacagatttggataagctcgttattgagttagaaactaatggtgcacttgagccagaagaagcaattcgtcgtgcagcaacaatcttggcggagcaacttgatgcattcgttgatttacgtgatgttcgtcagcctgagattaaggaagaaaaaccggaatttgawccgattttattacgtcctgtagatgatttagagctgacagttcgttctgctaactgtttgaaagcagaaacaattcattatatcggtgatttagtgcaacgtactgaagtagaattattaaaaacccctaatcttggtaagaaatctcttactgaaattaaggatgttcttgcttctcgtggcttgtcacttggtatgcgccttgaaaattggccgccagcaagtattgctgaagactagtttggtcataggttaagatttttctgagaaggataagatcatgcgccatcgtaagagtggtcgtcaactaaaccgtaatagtagtcatcgtcaagcgatgttccgtaacttagcaagtgctttagttagtcatgaaatcattaagactactttgcctaaagctaaagaattacgccgtgtagttgaaccgttaattacattagcaaaagtagatagcgttgctaaccgtcgtttagcattcgctcgtactcgcaacgttgaaactgttgcaaaattatttaatgaattaggtccacgttttgctcaacgtgcaggtggttacactcgcattttgaaatgtggttttcgtgcaggcgataatgcaccaatggcatacattgagttagttgatcgtccagaagttgctgaggcaacaactgaggaataaaaattaattctaaaaagaagctcactttatatagtgggcttttttattttatatattaaaaaaatctttatctgatttaatcattacttagatatattatttacaatcagcgagcagtggtaaattttaagagcatattcgtagatgtcgtgtatttttatctaaattccttgttttttaagctctctactaatacgaattgcggtttcagtttcacatccacaaaattccgctgcttctcggtaggcccaaggataatcgggataactttcagttaaattttcaatggcatcaataatacgttcgtaactacgcttataagctgtattacttattcggtgttctgcatcaataattcattagaaagttgtttcataagataacaagaaaaatcagggttatttgcaataaaatttgcgtgattaccaggaaatattctaactatatcggcttccattaatacttttgcactgcaatgataagatgtttcactaaaaatagtacgaaaaccaaaatattcattagcgtgataaagtcgagtcaatgtttctttgccattttccagactatgatacagaccaactagcccttgttttaaaaaataaaattctttaggcttctcgccttgtgcataaattaagctgtttttttctagagttttactctcagaaataatacatttatttaagttttgtggtagataatagggcaatgtaaacataaaggcgtcttttaatatataaataactttagattactatacaaatttctatatttttctgctataagcaaattatgaaaatgtgaagtgtttaacaaaattttgaactagataaatattattttattttgccaaatgattttgcaaatgactttaaatatggttccatatgagaaagtgctgaataatatgcctcacaaagttgattatgtgctttaccaaatccttgaattgtacg

SEQ ID NO: 373 - DNA, 2130 bp, ARTIFICIAL
  Sequence of the rpL21 gene and flanking regions.
ttcgccttccgctaaaacattagtcgcatcagccataatacttaaaattttcaatgattctaactgtgcaactaattgaaatgcacgcgtataaataaaatcgcctaccaacacactcgctgcattaccaaattcagcattcgccgtagcacgcccacgacgcatatcagattcatctacgacatcatcgtgtaacaaagaagcggtatgaataaattcaacaaaagtagcacaagtaattgaattagatccttcaaaccctaaagatcgtgctgcgagaactgcgatcaacggacggatccgcttaccaccaccttgaacaatataaaaacctaactgtcctattagcggtacatctgaattaagctgagcaagaatattttgattaactttttgcatatctggatctgcaagtttctggatctcgtctatgctcataagatcttgtttcttcatttttcatcatttatcagttaaaagtgcggtgcattttacccgaattttcagactttctgaaatcaatccgcaaatgaagggaatttttttattttattataaataaaatcttgccataggtaggatttttccgtagaatttgcgacctatttatatgaatttttaagtgtggactgctaaaaagcaggaaaacacaattaagcggagtatttatgtacgcagttttccaaagtggcggtaaacaacaccgtgtgagcgaaggtcaagttgttcgtttagaaaaacttgaacttgcaactggcgcaacagttgagttcgattctmtgttgatggtcgttaatggtgaagatgttaaaattggtgcgccagtagttgctggtgcaaaagtagtggctgaagttgttgcacaaggtcgtggcgagaaagttaaaatcgttaaattccgtcgtcgcaaacacagccgtaaacaacaaggtcatcgtcagtggttcacagaagtgaaaatcactgggattcaagcataatttcagaggagatcaagtagatggcaactaaaaaagctggtggttcaactcgtaacggtcgcgattctgaagctaaacgccttggtgttaaacgtttcggtggcgaatctgtattagcaggtagcattatcgttcgccaacgtggtactaaattccacgcaggtaacaacgtaggaatgggaagagatcacaccttattcgcaaccgcagatggtaaagttaaatttgaagtaaaaggcgagaaaagccgtaaatacgtagttattgttactgaataatttaaaatctattccattgaaacgccctacaattttmtggggcgttttgtcttttttaatttcacataagcgagcaaacaatgaaacaacaacctttattaggctttacctttgcgcttattaccgctatggcttgggggtcattgcctattgccttgaaacaagttttgtctgtaatgaatgcgcaaactatcgtatggtatcgtttcattattgctgcagtttcattattggctttacttgcttataaaaaacaattacctgaattaatgaaagtccgccaatatgcgtggattatgcttattggagtaattggtcttaccagcaattttctattatttagtagctcgctgaattacattgaaccgtcagttgcacaaatttttattcatttatcctcttttggaatgctcatctgtggtgtactgattttcaaagaaaaattagggttgcaccaaaagatcggacttttcttattattaattggtttaggcttattctttaatgatcgttttgatgcatttgctggactaaatcagtattcaacaggtgtcattttaggtgtagggggtgctcttatttgggtcgcttatggaatggcgcaaaaattaatgttacgtaaatttaattcacaacaaatcttgctaatgatgtatttaggttgtgccatagcctttatgccgatggctgacttctcgcaagtacaagaactcacacctttagctctgatttgttttatttactgctgtttaaataccttaattggatacggctcttatgcggaagcacttaatcgttgggatgtatcaaaagtcagtgttgttatcacacttgtacctcttttcacgatcctattttctcatattgcgcat

SEQ ID NO: 374 - DNA, 2800 bp, ARTIFICIAL
  Sequence of the rpS2 gene and flanking regions.
tttatctataaaaatattaaattttaacttctcgtttaagtatttacttttgagtgatttaaatcacgtaaatttttattttaaggcaataaatgaataataaaattagtgtttatgataaagataatttctttgagctttatcagaaactccgtgcaaatccaattagcctcaatgaaattatcgaaaagcccaccatgctttcattgttgcctaatttaaaagggaagaaattactcgatttaggctgtggtacgggagggcatttacaactttatttagaacgaggggcggctaaagtaattggaactgatctttccgaaaaaatgctcgaacaagctgaaaaagatcttcaaaagtgcggtcaattttcagggcgtttttccttatatcacttaccaatagaaaaattagctgagttaccagaaagtcatttcgatgtgattactagctcttttgcctttcattatattgaaaattttccgacattattatcaacgatccatgacaaactctcgtctaatggcacattaattttctcacaagaacatccgataactacctgccataaagagggagaacgctgggaaaaaaatgataaaaaacagcaagtcgcttatcgtttaaatcattatcgagaagaggggaaacgcaatagaaattggttcaaacaaccttttcaaacctatcatcgaacaacagcaacaattatcaataatttaattcatgcaaggtttcaaatcgagcaaatggaagaacccatgcttgctgaccaaccgcaatggcataatgaatttaaagatttgtcacatcgaccaccattgttatttatcaaagcaagaaaagtggagaaataaacaaaataaactggtttttaaccgcactttatggtataaatcgccccgctgtttttgcctttcaaaagcagttttttaattactaacaacacacacatattaacaaggcttaatcggggtgccaaacggtcgattagctgatatgtggaggctcaaccccaacaaaaggaaaatattatggcacaagtttcaatgcgcgatatgatcaacgcaggcgtacacttcggacaccaaactcgttactggaacccacaaatgaaacctttcatttttggtgctcgtaacggtgttcacatcatcaatcttgaaaaaactttacctttattcaacgaagctttagcggaattaactcgcattgctagcaacaacggtaaagtattattcgttggtacaaaacgtgcagcgtctgaagcagttcaagcagcagcattagattgtcagcaatattacgtaaaccaccgttggttaggtggtatgttgactaactggaaaaccgttcgtcaatcaattaaacgtttaaaagatttagaaacccaatctcaagacggtacttttgataaattaaccaaaaaagaagcgttaatgcgtagccgtgagatggaaaaacttgaattaagccttggcggtatcaaagatatgggcggcttaccagatgcgttattcgttatcggtgcggaccacgaacatatcgcagttaaagaagcaaacaacctaggtattcctgtatttgctatcgttgatactaactcaacaccagctggcgtagatttcgttatccctggtaacgatgatgcgactcgtgctatccaactttacgtttctgcagctgcagcagcggttaaagaaggtcgtggtaacgaagctcaagttgctgaagaattagcagctgacgcagaataatttaagttttgcaataaggcgaagccttaataatcaagcgattaattggcataggggctaaaatttagcccctatatttttatctaaaagtgcggtcaaaataaaccgcattttcgacagaggattttaaaaatggctgaaatcacagcatcattagtaaaagaacttcgtgaccgtactggcgcaggtatgatggaatgtaaaaaagcattagttgaagcaaacggtgatattgagttagcaatcgacaatatgcgtaaatctggtcaagctaaagcagctaaaaaagcaggccgtgttgcagctgaaggtgttatccttgctcgtgtagaaaatggtttcggtgtattagttgaaatgaactgtgaaactgacttcgtagcaaaagatgcaggtttcttaggtttagcaaatgaagtaactgatttcgcagcagcaaacaaaggtaccactatcgaagcattacaagcgcaatttgaagaaaaacgtgctgcattagttgctaaaatcggtgagaacatgaatattcgtcgtgttgcttacctagatggtcaagtaattgcacaatacttacacggtgcaaaaattggcgtattagttgcgggcgaaggttctgctgatgaactgaaaaaagtagcaatgcacgtagctgcatctaaacctgaattcgtgaacccagaagatgtatctgctgaagtggttgaacacgaacgccaaatccaaatcgatattgcgatcaactctggtaaaccaaaagaaatcgcagagaaaatggttgaaggtcgtatgaagaaattcactggtgaagtttcattaacaggtcaagcatttgtaatggatccttctgtatctgtaggggatttcttaaaatcagtaaatacttctgtttctaacttcattcgtttagaagtaggcgaaggtattgagaaaaaagaagaagattttgctgctgaagttgcaaaaatcactggcggtaatgcgtaattctttaaagataacgatatgttaataagcccaacttaagttgggcttatttgttttat

SEQ ID NO: 375 - DNA, 2320 bp, ARTIFICIAL
  Sequence of the rpL28 gene and flanking regions.
tcaaacctaaaaagtgcggtcaaaatctttcttatttttcttttataaatatatggaaaacaatgatgaattaatgccacgggaaaaattgctggcatttggagcaaaagcattaagtgattatgaactacttgcgatttttttacgtactggtatcaaaggttgtcctgttatgtcactttctaaaaatgtattaacgcattttggccccttgcacgctttactttctgcagataaaaaagctttctgttctgtaaaaggcttaggtattacgcaatttattcaactgcaagcgattacggaaatgaccaagcgttatttaaagcaagatatgttaagtacgccgattattaatgatcctgaaacagtaaaactttttttactcactgaattgcaacacgaggaaagagaagtatttatggttttatttttagataatcaacatcgtttgattaaaaaagagcggttatttttaggtacaatttatgtatcagcggtctatccgcgagaaattattaaagaagcactctattgtaatgcggcagctttaattttggcacataatcatccttcaggtataacggagccgagttattcggatcagcttattactaaaaaaattcaagatgcggctgaactaatggaaattcgcgtgcttgatcatttaattgtagggaaaagcgattgttattctttcgcggagaattgtttattataaatttttataatattgaccatttttttaccgattacattcaggaaaatcgcatttacacttgagaaatgaaaacaaagtcagtataatttgcgacctttaatatagtaagcgggtcggattagcgcgacctgacgaggtagcaagctaggtttaaccagctttaaacaatccgaaccgtaagctcgagcttatatttaattattggagattattatgtctagagtttgtcaagtaacaggcaagcgtccagctgtgggtaataaccgctcacacgcaatgaatgcgacacgtcgtcgttttcttccaaaccttcacactcaccgtttttgggttgaaagtgaaaaccgtttcgtaaccttacgtttaactgcgaaaggtatgcgtattattgataaaaaaggcattgatgcagtattagctgaaatccgtgctcgtggcgaaaaaatctaaggagctaaaaattttactacgccactttctacatcttcgatgaagttttcaaagtattgttcaactgctttcgcacccgcttcgccaccaatgccaaatgggcagcggtattcgtgtggatatggcataaattgtacgccaggcattaaattttcaacggcattttttgcaccaagattacccgttaaggctaatgccccttgggtcataccgtgaaaaccgccagagaaagcaatgatattgccacgccctgtgtaagttttcgctaatttgatggctgcttcatttgcatctgcaccagaagggcctgtgaattgtaagatatatttatctttcgggaagaatgacaataattcttcactaaacgcatctttaagtggagtggttaaatctaaagtgtgtaacggcaatccgctatctaatacgtctttaatggcttgcattaatataggatgattatgtcctaatgcaagggttcctgcgcctgctaaaaagtctaggtattcattaccttcaacatcagtaacccaacagccttgtgcttttgcataggcaaaaggtaatttacgaggataactacgtacgttggattccattacatcttggcgatctaaaaaatgttggtttgaagcaagaattgcttgtacaggggtaatcattgtcatttttgattaaaaccttctaaaagaggtgaaaaaaaataagtcgggtgccttgcgataaatttactgtttataaaacagacacatagggcatttgactcgctacttattaaaaaaagcgtttcagcttttttgtttttaccctagtttgcccattggacgggctaggttggaaacaggttttgatgtagggttacgtcaaaacggggacaattgtatattttttttgcaatatgaaaagtaaatttagcttcttacgagtcaaacggctaaataaaaagcaaacgtttctaataagaacaaataaaaaacccgagtttctactcgggtttaaaataattaaatcaatattatttgatttttgcttctttatagataacgtgtttacgcactactggatcaaattttttgatttccattttttcaggcatattacgtttgtttttatcagttgtgtagaagtgacctgtctctgcagtagaaactaaac

SEQ ID NO: 376 - DNA, 2320 bp, ARTIFICIAL
  Sequence of the rpS20 gene and flanking regions.
aaataacgcagggatcattaatttacgaattttggttacgccttcatccctccacgcccattttggtttcaccagcaaacctgcttgtttcataaatggaatttggaataagaactgtaataagccgccaagaaaaattccgatagcgagcgcaagatctgggttatccatttgtggtgcgaggaaaagtgcggtggcaatcatcgctatatttaataacacgggtgaaaaggacatcacaccgaattttccaatcgtgttaagcacagcgccagaaaatgccacaaaagtaacaaaccataaataaggaaaagttattttaagaagaagagaggcttgttcaaacttatgtgcatcagggccatcattcatccaatcggtgaaccagcccatcccaaataaagcggcaacgtgtggcgatccaaccatcgccaaaatcgtaacaatactcaccaatcccccaagggtaccagaaacttttccaataaattcacgggttttattcatatcgccagattgttgatattctgcgagaacagggacaaaagcctgtgaaaaagccccttcagcaaataaacggcgaagaaaatttgggatacgattagcaaataaaaagacgtccgctgcggcgcctgccccaatgagatgagcgataactacatctcgcacaagacctaacactcttgataataaagtcatagaactaacaacaatgctagattttaaaagtcgtttactcaaaatattcttctctaccctaaaatttttgcctaattgtatagaaattttgtttttacgctatattccgtgaaaaaaaactgataaaatccgccacacatcgtttgtgtgagcccatattgaaagagcttgtaaaaataacgatacttactttcggttgtgtctcaccgaaatcaacacaaattttccattgacaaaagtataaaaaatcggcatattgatgccctttattttgtctatcaatcaacagaaattttaggagtttgaccttggctaatatcaagtcagcaaaaaaacgcgcggttcaatctgaaaaacgtcgccaacacaacgcaagccaacgctctatgatgcgtacttatatcaaaaaagtatatgctcaagtagcagcaggcgaaaaatcagcagctgaagcagcattcgttgaaatgcaaaaagttgtagaccgtatggcttctaaaggcttaatccacgctaacaaagcagcaaaccacaaatctaaattagctgcacaaatcaaaaaattagcgtaatttttagctagaaagaatgaaaaaataaaaccgcactttaaagtgcggttttttattgcatcgaatgttagactaaagtaacaacatcgatccccatttgataatatcaaagaagaatttattttgattggttgcaatgccatcagaattttttggtgtgccatcttcatttttttgcacttccaccatgccatttttatattgacctttcacggcagccaaatcatcgcgcgcttcgttacgcaatttcaaacaagactgtttagttaagggttcaacattgctcactctggtacggaattttttaaactgatagcttgcataattcattgatttttcatcggcttggataatcttcacatattgttcgccaataattttttccaacggatagaaaaagacatattgtgagtgaatatagctatcttcttttgaaaaatgctgttgcaaaattcgagttaaatttgggtaaacgcattgttctacttgcttacttgcaatcgcccattgttttgcatgttgatcagacagttgataatcagctccagcaaattccgctggaattgcggattgttggctatcaaacattgaacagccagacagcaatgctgccatacctaaggttgcaattaatttcacatttgatccttataaaagtgagaatgtgcaaaattctagcaatatcttcacaacagataaagcagcaaatgaatttagttttcctgatctgaaaaacttccgctataatgaccgcacttttttacgttaattaaaaggaattcttatgcaaaatccaaaagatgatgttttatatgcgcctgttgaatggatcgatcacagtgaaggctatagcgatattcgctatcataaatccactgatggtattgcaaaaattaccattaaccgccctgaagttcgtaatgcgttccgtccacaaacagtgaaagaaatgatgactgcattttctgatgcacgtttcgatgaaaacattggtgtcattgtattaactggcgaaggcgaaaaagcattctgttctggtggtgaccaaa

SEQ ID NO: 377 - DNA, 1963 bp, ARTIFICIAL
  Sequence of the rpL43 gene and flanking regions.
aaatacaatgaggctactgtgcgtataggtggtggtttaggctatcaaactgcctcagttgaagtctcgttgtttccttttcaagaaaaacgctggtatgcaggcggtagctctggaacgaatacaatgaagcaatatgcggataaattgggtattcgtttagaaaacgtagattggctaagtaaaacttggcaaatttctaccgcacttgagtatggagaatctcgttataaaatccgaaaacatttagatggtaattattatttcgtttcatcaacattattttatttacctaaaagcacccaattttggtttgttggcatggattttcatagagaaaatacacaagcattagataatgcttatcaacaaaaaacattgagacttggttgggggcaggattggttttatggtatttcatcacgtcttacttttagttatgccaaccgagtgtatagagagaaagatttgattggtatacagcaaaaaaatcgtgaatacacaaccacaattactttatggcatcgaaatatacattttatggggctaacacctaaattatcgtgggattatcaaaaatccaccagtaatcatgctttttatcgttatgataaaaatagaatttatctcgaaattggaaaaatattttaaggctgaaaagttgtaacctaacttttgaggtatctctaactttagcaaagtgcatatattttttaatattcgtttgaagttttttttaaaaatttccgtttcttatttgacgaacgcgtattttatgactagaattgcgctctattttattcactcttaattgtatttaggtaaattaaaatgaaacgtacatttcaaccttctgtattaaaacgtagtcgtactcacggtttccgtgctcgtatggcaactaaaaatggccgtcaagttttagcgcgtcgccgtgctaaaggtcgtaaaagtttatctgcataatcacaattcacaattcttagtggttaagctgaacttttcaagggagttacgtttattaactcccattcaattcaaaaatgttttcgaacagccattcagagctagtactcccgaaattacaatccttgctagaaaaaataatcttgaacatccgcgtttaggtttgaccgttgctaaaaaacatttaaaacgcgcccacgagcgtaatcgaattaaacgcttagtacgagaaagttttcgtttatcacagcatcgtttgcctgcttatgattttgtttttgtagctaaaaatggtattggaaaactcgacaataatacatttgcacaaatactcgaaaaattatggcagagacacattcgcttggcacaaaaatcttaattaagattatccgtctttatcaaataatgattagtccgtttattggggctcgttgtcggtttgtgcctacttgttcttgctatggtattgaagcattaaaaacacacggattattaaaaggtggttggcttacgctgaaacgtgtattaaaatgccatcctttaaacgcaggtggattcgatcctgttccaccaaaaaccaataataatgatgagaaaaaataatggactcaagacgtagcctattagtgcttgcactgatttttatttctttccttgtttatcagcaatggcagttggataaaaatccacctgtgcaaactgaacaaacaacttcaataactgccacttctgacgttccggcaagttccccttctaattcacaagccatagctgattctcaaactcgtggtcgtattattactcttgaaaacgatgtgttccgtttgaaaattgatacattgggtggcgatgtaattagctctgaattattaaaatatgatgcagaattggattcaaaaacaccgtttgaattattaaaagatactaaagagcatatttatattgcgcaaagtggtttaattggtaaaaacggtattgatactcgttctggtcgtgc

SEQ ID NO: 378 - DNA, 2960 bp, ARTIFICIAL
  Sequence of the rpS1 gene and flanking regions.
  misc_feature (64)..(64): a or g or t or c
  misc_feature (882)..(882): a or g or t or c
  misc_feature (940)..(940): a or g or t or c
  misc_feature (1339)..(1339): a or g or t or c
  misc_feature (1577)..(1577): a or g or t or c
tatgcaaagcatatacctattttaagaaaatgtgatcaatatctcataaaatttaacattttgnttccatttcttacatttttattactatttgtgtttagttatagcattaatagaagaatatagaatatgataaagattsstttaatgccatattaacattagcaggattaccaaattctcactataatgcgcaaaatttggagaatgaaaggataatttgtatgggaatgattattactgttgatggccctagtggtgctgggaaaggaacgctttgttatgcgttggctgaaaagttgggctatgcattgttggatagtggggcgatttatcgcgttactgcattggcagcgttgcaacgtaaaactgatctaacaaatgaaacagatttagcagaattagctcgtcatttagatattcaatttattcctcaaaatggcgaggtaagcattttgcttgcaggaatggatgtgagccgtttaattcgcacgcaagaagtggcagatgctgcgtcaaaagtagcagtctttcaaaaagtgcggtcagctttattacaacttcagcaagattttgcaaaaaatgatggattaattgcggatggcagagatatggggactgtggtattcccaaatgcacaagtaaaattatttttagatgcaagtgctgaagaacgtgcaaaaagacgctataaacagttgcaaaataaaggaataaatggtaactttgcacagattttagccgagataaaagagcgtgattttcgtgatagaaatcgtgaagttgcgccgctaaaaccagcagatgatgctttattattggatagtacaaccttgagtatcgatgaagttattgatcaggcgttagcttatattcaaaganaaggtatcagtttccgatttaactgtttgttcaaggaagaataagcatttatcctcanaccccgcattttatggattttaatgtggatgttattaacttaaattaagaagattatttatatgtcagaatcttttgctcaactttttgaagaatcattaaaagtccttgaaactcgtcaaggttcaatcgttagcggtactgtagtagctatccaaaaaggctttgtgcttgttgatgcaggtttaaaatctgagtctgcaattccagttgctgaattcttaaatgcacaaggcgaacttgaaatccaagttggcgatactgtaaatgttgcattagatgcagttgaagatggtttcggtgaaactaaactttctcgtgagaaagcggttcgtcacgaatcttggattgaattagaaaaagcttacgaagaaaaagcgaccgttatcggtttaatcancggcaaagtgaaaggtggcttcacagttgagttaaacggtgttcgtgcattcttaccaggttctttagttgatactcgtccagcgcgtgaagcagatcacttacttggtaaagaattagaattcaaagtaatcaaattagatcaaaaacgtaacaacgttgttgtttctcgtcgtgcagtaattgaatctgaaaacagccaagaacgtgaacaagtattagaaaatcttgtggaaggntcagaagttaaaggtgtcgttaaaaacttaactgagtacggtgcattcgttgatcttggtggtgttgatggtttattacacatcacagatatggcttggaaacgtgttaaacacccaagtgaaatcgtaaatgttggcgatgaagttactgttaaagtattaaaattcgataaagatcgtactcgtgtatctttaggcttaaaacaattaggtcaagatccatgggcagcaattgctgaaaatcatccagtaaacagcaaattaacaggtaaagtaactaacttaactgactatggctgtttcgttgaaatcttagatggcgttgaaggtttagttcacgtttctgaaatggattggactaataaaaatatccacccatctaaagtggttagcttaggcgatactgtagaagtaatggtattagaaattgatgaagaacgtcgtcgtatttctttaggcttaaaacaatgtaaagctaacccttggactcagtttgctgatactcacaacaaaggcgataaagtaacgggtaaaatcaagtctatcactgatttcggtatcttcatcggtcttgaaggtggtatcgatggtttagttcacttatctgatatttcttggagtatttcaggcgaagaagctgttcgtcaatacaaaaaaggtgacgaagtttcagctgttgtattagctgttgatgcagtaaaagaacgtatctctttaggtattaaacaacttgaagaagatccattcaataactttgtcgcaatcaacaaaaaaggtgcggtagtatctgcaactgttgttgaagcagatgctaaaggtgctaaagttgaattagcaggtggtgttgaaggttatatccgttctgctgatttaacaagtgaagtagctgttggtgatgtcgttgaagcgaaatacactggagtagatcgtaaatctcgcattgttcacttatcagtgaaagcaaaagatcaagctgaagaagctgcggcagttgcaagtgtaaataacaaacaagaagatattgttattccaaatgcaatggctgaagcatttaaagcagctaaaggtgaataattaattcacgtaataaggctgggctgatgtccagccttatttgttaggagttattgctaatatatttgtgtaatttattatcaatagatcttaatttaagtaatattaaggaagtatagacgatgactaagtcagaacttatggaaaaattgtcagcaaaacagccaactttacctgcaaaagaaattgaaaatatggtaaaaggtattttagagtttatttctcaatctcttgaaaatggtgatcgtgttgaagttcgaggttttggtagcttttctttacatcatcggcaaccacgtttgggaagaa

SEQ ID NO: 379 - DNA, 2720 bp, ARTIFICIAL
  Sequence of the rpL35 and rpL20 genes and flanking regions.
  misc_feature (1253)..(1253): a or g or t or c
atccttggcacaaaaagacgagtggaatgagtgaaactggctatcaaaagatgttgtgcttagaaactgcacgtatccatcacttgcttgaatttggcgaaagtttaagcgtagaaatttcgcttaaaggctaaattttgttgcataagtggtgtgaatactatagaattcgcgagactttgctcgttccttgcgggcaacaaatttgaaatcttttatttttagcgaaaagatttttactattaaccaatagaaggaatacgattattaaaaccgtaaaaaaagcaccggcagtaaatcgcccaaaccgtatcaatgaagagattcgtgtaaaagaagttcgtttaattgaccaaaatggtgaacaagcagggattgtttctattcaacaagccctagaaatggcagagcaagcagagcttgatcttgttgaaattagcccaaatgcagagccgccggtttgtcgcattatgaactacggtaaattcctttacgaaaaaagtaaaaccgctaaagaacaaaagaaaaaacaaaaagttgtccaagttaaggaaattaaattccgcccaggcacagacgaaggtgactatcaagttaaattacgtagcttaatccgtttcttagaagacggtgacaaagcgaaaattaccgtgcgtttccgcggtcgtgaaatggctcatcaagacatcggtttagatgtgttagagcgcgtaaaaaatgatttagctgaaatttcagtggttgaatctgcaccaggtaaattagaaggccgtcaggctgtaatggtgttagcaccgaagaaaaaataagaattttgctgagatttttcagcaaatctttttgtttaagtttgacttaaatgaaaagacaactgcatgttgggcacactacgcagcctaactgcttttgaaaaggcgatttaatttgccttatgatggaaatgatcagtgcttccaagtaactttataagttcgcctgattatgttgttttaaacgaaaaatgcggagttattttaacaatgcctaaaatcaaaacagtacgcggcgcagcgaagcgcttcaaaaaaactgcttctggtggtttcaagcgtaaacaatctcacttacgtcatattttgactaaaaaaacaactaaacgtaaacgtcatttacgtcataaatcaatggttgcgaaagcagaccaagttttagtagtagcttgcttaccatacgcataagccgttatttaagcaaaacgtacgattagttcattnttagaaaaatattacataggagattaaataatggctcgtgtaaaacgtggtgttattgcaagagcacgccataagaaagttcttaaggctgctaaaggttattatggtgcacgttcacgcgtgtatcgcgttgctttccaagcggtgatcaaagctggtcaatacgcataccgtgaccgtcgtcagcgtaaacgtcaattccgtcaattatggattgcacgtatcaacgctgcagcgcgtcaaaatggtttatcttatagcaaatttatcaacggcttgaaaaaagcatctgttgaaatcgaccgtaagattcttgctgatatcgctgtattcgacaaagtagcgttcgctgcattagttgaaaaagcaaaatctgcactttaattttttaaagtttagataaagaagaattaggacgctgaaaagcgtcctttttttgcacttatgactttaaattttgtaaaataatgccattagttctcatctgttaaaatctatggccgaaacaatcccactgaatcctatcacgttgcctttaaatcaaattagcttaatcgaagcatctgctggtacggggaaaacctacactatcggttctttatatctccgacttttattaaaggctggagaaaataacttttctcgtccgttaaatgtggaagaaattctggtggtaacatttacggaaatggcaacagaagaactcaagaaaaaaattcgtgagcgtataacagatgcgattaataaactcactgcctttgctaaaacccaagataaatccgcatttaaaaatgatgaatttcttaccgcactttgtgataatttgaacatttttgaggcaattcatcgcttaaagttagctgagcaaaatatggatttggcggcgatttataccattcacggtttttgtcgccgtatgttgatgcaatatgctttccattcaggcattcacttcaatttagaattaataaaagatcaatctgatttgttagttcgttttgctaatgaattttggcgagaacatttttatccgttagattttgaatctgcgaattttatcgcgacagaattagtatcaccagcaaatgtgttgtctttgttgaaagcggatttaggtaaagatttgcaggtggagattgaaaataaacaggcgttatctgtaccaatacaaatctttttaccgcaatatcttggtggttatcaaaaggcgttgaatgaattaaaggcattttggttagaaagtgcggatgaaatttcagcgattattacaaatgagctggttaaagattatccaaaagatcagttgaaatcgttaaatcgtaaaaagtaccaagtaaagcgtttaggggattggattaataaaattaatcaatggtcaaataatcctagagattatcaaattaataccacattgaaagactatttcctacaatcatctattgagaaaaattgcgaagaatcaacgga

SEQ ID NO: 380 - DNA, 2000 bp, ARTIFICIAL
  Sequence of the rpS15 gene and flanking regions.
aatatgatggtaaatgatgattttcaagaatatgtgaagcaactggtaacaaaacatcgagatgaacgaatttatccttttcaatatgaaggaaaaaaatattggttgaagcaacctgaaaaattgaaaggtatttggctattattaaaaccccatcctaaaaaatcttttaaaaatgaattatatactttattgaagcttgctgaacaaaatgcgccagtgccaaaagtctcttattatagtgatcatttttttgttttagagaatgtgggacttaccgtatcacaatggctatgtaataaaaatatagatgaacaacagaaatttttaattatttatgatgcttgtctcgctttgattgatttgcatgctaaaaatttggtgcatggtcgtcctgctattcgagatattacttgggataaagggaaagttacttttcttgattttgaatctcgttcaaatagccgaaatcaaaattgggtagttattcgggatatgttatttttctttgatagtttatgtcgagaagaagatatttcggacacttttattcaaaaagtagcgttgtattatcaaacacattgtgaagcgaaaaattggcaaaatatgatcgtatttttgcaacgttttagctgggtttattatcttttattgccttttaaacctattgcaaagacagatttaatttcgatttatcgcttatttgaaattttcttgataaagaaaaaatgatgaagaaaatattttttatttttgcattatcaggcatattagctgcttgtactgtgggtggtggtgttagtgctggtggtggaagtaatggtgtaggattaggtgtggggattggatctggtattcgcttctaataatgaaaagtgcggtaactttaatctttatcttgcatttgaacttattcatcgttagaatgcgatttccttgtcatcgctgagttagagatcggcgaatgatgtattaacaacactaccttttaggagtaaaaaatgtctctaagtactgaaaaaaaagcagcaatcgttgctgaatttggtcgtgatgcgaaagataccggttcttctgaagttcaaatcgcattattaactgcacaaatcaaccacttacaaactcactttgcagagcacaaaaaagaccaccatggtcgtcgtggtttattacgtatggtttctcgtcgtcgtaaacttttagactacttaaaacgtactgatcttgctttataccaaagcactatcgctcgtttaggtttacgtcgctaattttttattacgatagtaaaaaatcaagccctcgaatattgagggcttttttatggggctgtactagataactagaccaaactccccttaactaattgttttaaaatggaaatttgagattttatttcgctattgttaaaacgccattcacattcttttaaatacagctcaaaatgctctttgggaatgccattaaacttctgtaaatggcgttttgcgtgattccaaaaattcccaattccgtttatgtagttgtgattttcagcaaaatgcgtgctgtgattgatgcgaaaatggctaaattcactgacatcaagcacatcataactacgaaaggtatccgtgtacacaatgctatcaggcttaactttctctcggataattggcaataatgttgctgattgcacattaggaacaacgacggtataaaccttgcatttcatttgagaagcccgaatactgcgactttccctgcaacactgcgaccacgtttgccttttcgagtactgccgaaatagctttcatcggcttcaattttgccttcaaacatttccaaatgtgggcttgtttgataaatgagtaagcgtaatcgatgaaagtaatagtggctgtatttttgtttacattaaccaatttactggctgttcttgctgtgacacctgcgacaaacagttcaatgagtttattttgtttatgctgacttaagcgactttttctcattggtttatt

SEQ ID NO: 381 - DNA, 2761 bp, ARTIFICIAL
  Sequence of the rpS9 and rpL13 genes and flanking regions.
aacttcgggataagcggctacagaaatatcaaaatcagcgacagaacggagtaattccacaagatctgacgcataaaatggttttttcgcgtaacctttaggttcgtcaccgcgtaacgcaacaatacggcgaataccactatcccaataatctctcgcaatttgttttaattcttcaggtgtggcatcaattccagttaaatgtggtgcggcttctaagccagtttcttgtttaatggctttcacaatgccgtgagtgcggtcacgttctcccgaatttgcaccgtaagtgactgacacaaatttaggctttaatacttttaaacgatgaattgaatcccatagaagggtttccattttttcgtttttaggtggaaaaaattcaaaggagacattaatttttttattaaaatctgcaatatgttgatttaatgtatcaatttctttcgcgtagctcataaggcttcctttaggattctaaaatagtatttgtacaataaaataggttttaatatgagtcaatttcaatttattcattaaaagtatgattattattaataattcaataaatggataattattgttcaataataactaatttttagatcaacacatactcaaaactaccgcacttttgttagcaatgatttaccccattttacaacgaaaaagaaagtgcggtaattttttgtgtatttttatagaaagataaatgcgtgttaaataaatacaatagatttgttttttagcgcaaaaaattagcattttatgaaaaaacgagtataatacgccgaccctgtaaatgtgcgaattcccatcgtacattattttatcgagatcgcactcgaaggggtggcgattaagattaatggttgtgttcataagaacactgggtatcaaactaatttttggtaattaattaatgaaaacttttgtagcaaaaccagaaacggttaaacgcgactggtacgtagtagatgcgacaggtaaaactttaggtcgtttagcgactgaattagcacgtcgtcttcgtggtaaacacaaggctgagtacactccacacgtagatactggtgattacatcatcgttatcaacgcagacaaagtggcagtaactggtcgtaaagaaacagataaactttactactggcacactggctatgtaggtggtattaaacaagcgactttcaaagaaatgatcgctcgccgtcctgaagcagtgattgaaattgcggttaaaggtatgttgccaaaaggtccattaggccgtgcaatgttccgtaaattaaaagtgtatgcaggtggagaacaccaacacgcagcacaacaaccacaagtattagatatttaatcacgaggtttagaaaatggcagagaatcaaaactacggcacaggccgccgcaaaagctcttcagctcgtgtatttatcaaaccgggcagtggtaaaatcactatcaaccaacgtgaattagatgtttactttggtcgcgaaacagcacgtatggtagtacgtcagccattagagttggttgawttaactgataagttagatttatacatcacagttaaaggtggtggtatttctggtcaagcgggtgcaatccgtcacggtatcactcgtgcattaatggaatacgatgaaacattacgcccagcacttcgtgcagctggtttcgttactcgtgacgcacgtcgcgttgaacgtaaaaaagtgggtttacacaaagcacgtcgtcgtccacaatactcaaaacgttaatttttattttcgtttccaaaagaaaagcagagagaaatctctgcttttttattatttgagttactctaacttattgattataaaacaataaaaaagattatattggcaaataggtaatgctttatggtaaaatgttgccccttaaaaacctagaatatttttggatcttcggaggaataaatgtccagcgcatcaagtaaacgttcagtaatgacccttttttcaaataaagatgatatttattgccatcaggtaaaaattgttttggcagaaaaaggtgtgctttatgaaaacgcagaagttgatttgcaagctctaccagaagatttaatggaattaaatccatacggcactgtgcctacgttggttgatcgtgatctcgtattatttaattcacgcatcataatggaatatcttgatgaacgttttccacatcctccattaatgcaagtgtatcctgtttctcgtgctaaagatcgacttttaatgttacgtattgaacaagattggtatccaacccttgcaaaagcagaaaatggcacagaaaaagaaaaaacttcagcattaaaacagttaaaagaagaactattagggattgcaccaatttttcaacagatgccttattttatgaatgaagaatttggtttggttgattgctatgttgcaccattattatggaaattaaaacatttaggtgtggaatttacaggcacaggaagtaaagcgattaaagcttatatggaacgtgtgtttacacgtgattcttttttgcaatctgtaggtgaagctgcaccaaaaaatttaatggatgataaataatggaatataaatcttctcctaaacgcccttatttattacgcgcctattatgattggctagtagataatagttttacgccttatttagttgttgatgcgacttacttaggtgtgaatgttcctgtcgaatatgtaaaagatggacagattgtattaaacttgtctgccagtgctacgggcaat

SEQ ID NO: 382 - DNA, 1920 bp, ARTIFICIAL
  Sequence of the rpL25 gene and flanking regions.
tgggcgaaaaagatcaaaaaggtttatttacccaacagttaattactgcaacagataaatctcaaaatgaacagcctagagattattcggagggtgcatcaggcttatttaaagaaaataaagaagaaaattaaaaagtatggctaaaaatagaaatatttttagccgtttattattctattattgcgttgattttttagattttttccatttccaaaaaagaatagtacaagtacccaataaatatataaatcacaatttgacctttttgaatttgtgtatgtagccaatctaaatttttagcccccaattccccaagataaatccaaataggtacagaaataatcgcagcacagaaatctattaaaacaaaacgaacataacttacacggcgtgtaatacctgataccatataaattggagcacgtaaaccgggtaaaaatcgtgcaacaaacagtactcgattgccatattgactgaatttttcacgcaccattcttaaacgctgtaatgttacgattctacgtattggtcggaaacgtaaaattttcgtgccataaattcgaccaagccaatacatacaggaatcgccagcaagcacaccaatcatactaaccagtaacatcaaatgagaattgacattttctggataaagccccgcaatgacaccacctgaaactaatgttatatcttctggaataggtacaccaaatccacaaataattaaaacaaaaagracagcccaataaccatattcagtaaaaaatccaattaaaaattccatttgttcctgcttttttattatattaatagatgtgataaaaaattggttcacattttaatcttttcaaatcaaaaagcctagaaaaaagtttgatttgaaaataaggatattctataatccacggctctcaaggcttgtctttgagcggtttttaggaaaattgctgggtcgcctgcgattttctttcttttaacattaatttaaagagaacattaaaatggcatttaaatttaacgctgaagttcgtacagcgcaaggtaagggtgcgagccgccgcctgcgtcacaatggtcaaattcctgcaatcgtttatggtggtagcgaagagccagtttcaatcatcttaaaccacgatgaattaaacaacgcacaagcacacgaatctttctattctgaagtgatcactttagtagtagagggtaaagaagttgcagttaaagtacaagctatgcaacgccatccattcaaaccaaaattggttcacattgacttcaaacgcgcataattctaattcacgcatttaaataaaataacaaaaaagctaagacattcatcttagcttttttcttacagattcattgtttctcaataaatatctaaacttcaattttttatcaaataacgttttaagttttcaccaacaaattctaattctgcttttccatagtttggctgaaattctaaaaaaatcaccccagcctttcgacaagcctcccgtttcactgcatcacgcttcgccgcattatcctgataatgtccctgcccttgatattcaattactattacggcatagccgttcttatctacaatcaaaaaatctactcgtttactatttatcgcaaaatgggcctctttatctattgattctaaaaactcccccattgaaacctgagtaaataaacggaactcttgataacctttagacaacaacttttctaaacgaagaaaaagttgatattcactcttattcattaaggcttttcttttatacttactcaatatgacgacatcaagatgatcatttttattcacaatattaattttgttttctgtcgaaagataaagacgactcttcttttcattacgacgagttgatctcgatttagatgaaaataagccaattagaaataaaataa

SEQ ID NO: 383 - DNA, 5252 bp, ARTIFICIAL
  Sequence of the dnaE gene and flanking regions.
  misc_feature (599)..(599): a or g or t or c
tttatctgctggtgaaacgatttgaccgccaccatttgctttacctaaatacactttgtagccattatcttctggtgggttatggcttgctgttaccattacacctgcagtggtatcaaaatattggatagcataggctaaaactggagtcggtaatttgcgtggtaataaataagcttttacgcctgcacccgccataatttcagcggtgtcacgggcaaaaacatcagagtttttacgaccatcgtaaccaatgacgattgagggttctttatcgtaaccttttaaatattccgctaaaccaccagcagcttgagaaactaaaactcggttcatccccattgagccagcttgtaaacgaccacgtaaacctgccgtaccaaattgtaagcgaccatcaaaacgcgcatgtaattctgcttctgccgctttatctccgccttttgcggcatctaaaagtgcggttaattctgcacgagtttctgcgtcaggatcttggtttaaccaatgttgtgcaacctccaaaagtgttgtcatagcgttatccttattcgttgaaataaataaaaaatcgtcgttagactagcggaaatctaacnaaatgaaaacggctaattatcaattttttgatctacttaacattttttattcacgcaatcggttatccgagccaatttgggaacactatttgtagcataagcatttgtttgaaaaattcgctataataccgctttaatatttacggcaaaatttaaccgcactttaaggattttcaatgtcatcccaacctcgcttcatccatcttcgcacacacacagatttttcgatgattgacagtatcgtcaaagtgaaacctcttgtgaaagcttgtgctgccaatgaaatggttgctatgggattaacggattttactaatttttgtggtgtggttagtttttatagcgaaatgctttcttcgggtatgaagcccattatcggggcagatgtaaaagtaaaaagcccattatgtggcgatgaatactttgatcttactttgctagctaaaaataatgaaggctatagaaatattactttattgttatcaaaggcttatcaacgcggttataacgatttaccttatattgatcaagattggttaattgaacatcgcgacggcgtgattattttatcagggggaacgcaaggcgatgtgggtaaaaaattgttgaaagaaaacgtagccgaaattgaaagtgcggtcgctttttaccaagaattttttgccgatcatttttatttagcattaagtcgtacaggtcgcccaaatgaagaacgttacattcaagcagcgttgaaattagcagaacgttgtgatttaccattggtcgcaactaatgatgtgatgtttttgaatacagaggattttgaagcccacgaaattcgcgtagcgattcacgatggctatactttagacgatcctaaacgtccgaaatgttatacctcacagcaatattttcgtagtgaagaagatatgtgtaagctgtttgcagacattccttccgctctcgaaaataccttattaattgcgcaacgttgtagtgtgactttgcgccttggtcaatatttcttacctcaatttccaactggcgatttaagtacagaagatttcttagtgcaaaaatccaaagagggcttggaagaacgtttagtttttttattccctgatgaaaaagtgcggttagaaaaacgaccaaaatatgatgaacgcttgcaagttgagctagatgtaattaaccaaatggggttcccaggttatttcttgatcgtaatggaatttattcaatggtctaaggataacgatattccagtagggccaggtcgtggttctggtgcgggttcattagtggcttatgcattaaaaatcactgatttagatccgttagagtttgatttgctatttgaacgtttcttaaatccagaacgtgtgtctatgcccgatttcgacgtggatttctgtatggacggtcgcgatcgcgtgattgagcacgttgcagaaacctatggtcgtggcgcggtatcacaaattattacctttggtacaatggcggcgaaagcggttattcgagatgtagggcgagtgctggggcatccttatggtttcgttgatcgtatttctaaattgattccgccagatccaggtatgacgcttgccaaagcgtttgagaccgagccgcaattacagactgcctacgatagcgatgaagaagtgcgagcattgattaacatggcgcgcaagctggaaggtgtgacacgtaatgcaggtaaacatgcaggtggcgtggtcatttcgccaaccttaattactgattttgcaccactctattgtgataatgaaggcttacatccagttactcactttgataaaaatgatgtggaatatgcagggcttgtgaaatttgacttcctaggcttgcgtactcttactatcattaaatgggcattggatataattaatgttcgtatggtgcgtgaaggcaagcctcgagtagatattgccgccattccacttgatgatcctgaatcttttgaattacttaaacgttccgaaaccaccgccgtgttccagttggaatcacgaggtatgaaagatttgatcaaacgcctgcaacctgactgttttgaagatattatcgcattggtagcattgttccgtccggggccgttacaatcgggtatggtagataactttatcgaccgtaaacacgggagagaagaagtatcttaccctgacgcagaatatcaacatgcaagtttgaaacctattcttgagccgacttacggcattattttgtatcaagaacaagtgatgcaaattgcgcaggtgttggctggctatacgctgggtggggctgacttattgcgtcgagcaatgggtaaaaagaaaccagaagaaatggcaaaacagcgtttagtgtttaaagagggggctgagaaaaacggtattgatggcgagctatctatgaagattttcgacttggtggaaaaatttgctggctatggttttaataaatctcactctgctgcttatgccttggtgtcttaccaaactctttggcttaaaactcatttccctgcagaatttatggctgcagtgatgacatcagaaatggataatacggataaaatcgtaggtttatacgacgaatgtttgcgtatgggcttaaaagtgacgccaccagatattaatatcggaaaacaccattttagtgtcaatgaacaaggcgaaattgtgtatgggattggcgcgattaaaggcgtgggggaaggcccgattgaagcacttgtggcggcaagaaatgaaggggggattttcaaagatttattcgatttatgcgctcgtgtagatttgaaaaaaattaaccgccgtacttttgaaagcctaattatgtcgggtgcctttgataaattaggcccacatcgcgccgcactttctaagaatttggaagatgcacttagagcttccgatcagcatgcgaaagatgaagcaatgggacaaacggatatgttcggtgtgctgactgaaacccatgaagacgtggaaaatgcctatgctaatacaccgccttataccgaaaaacaaatccttgatggcgaacgagaaaccttggggctttatttaagtagccatcctgttagccgttatttgaaagaactttcccattacacatcgacgcggttgaaagatctcgcaccaaatcgccgtggacaaattagcactgtggcggggctcgttgtggcatcgagaattgcgatgacgaaaaaaggcaatcgtctaggtattgcaacattggatgaccgttcaggtcgcttagatttaacattatttggtgaaagcctagaacaatttggtgagaaattacaaaaagatacagtgattgttgcttcagggcaggtgagctttgatgatttctctggtggcttgaaaatgacggtgcgcgagttaatgaccttagatgaggctcgttctcgttatgtcaaatccttggctattagtctttctgagcatcaaattacaccaagtttcattaaacaatttaaagcattacttgagccagtgagtggtggaacattgcctattaacgtgtattatcaaagtccgaaaggtcgtgcgttgttacgtttaggcgtgcaatggtcgatcattccaacagatgaaattctgacggaattggtgaatttactcggcgaaagtgcggtggaattagagtttgaataagacaaaggcgtgaaaaatatcacgccttttttataggattaacgtaagaaataacgataagatttgctttttgttacatcttcaaaaacataattgagttgggcaagtccctgttcaaattctgcttgttcgcgttgttcaatttggaaacctgcaaggatatttccatagtccgcaccatgggcacgatagtggaataatgaaatattccaacgattttgcaaggtttccaagaattttaataaggcacctttttgctctgggaattcgaaggtatataagcgttcgttatcattggctgcacgaccacccattaaatagcgaacatgcgttttcgcaatatcatcatcagacatatcctcaacatcaaaaccatttttcgtgaggtctgcaataatatctgctttttcttgctcatttgtcgttcttaccccaacaaacacgcaagcgcgtttatcatctgcataacgataactgaattcggttacagctcggttacctaatacataagcaaattttaagaaactacctggttgttcaggcatggtcacggctaataaagcctctcgattttcaccaatttcacaacgttcagatacataacgtaatgtgtggaaattcaagttcgcgccagacaaaattgccgccatatttttgccttcaatatggttttgttttacatattttttcaaaccagccaaacctaatgcacctgatggttctgcaacagcacgaacgttctcaaacaaatctttcattgctgcgcatacttcgtcactatcgaccaataccatatcatcaagatattgctgacatagacggaatgtttcgtcgccaatgcgttttacagcaacgccatcggcaaataatccaatatgggttaaatctgttggttcgcctttatcgagagccgcttttaagcacgcagaatcctttgattctacaccgatgattttaatttccggcataaattgcttaagcaaaattgccacacccg

SEQ ID NO: 384 - DNA, 2560 bp, ARTIFICIAL
  Sequence of the mesJ gene and flanking regions.
ccacgtagtctatggttttgcaggtaacaaatccgcgacttttccaatgcagttgttaggcgtagatgtatgggcattaaataccgttcaattttctaatcacacacaatacggaaaatggacaggtatggtcattccacaagaacaaatccgagaaattgtaactggacttgataatattgaaaaactacaagaatgtgatgccttactatcaggttacttaggatctgcggaacaagtcgatcaaattctttttgccttagaacaaatcaaactgcgtaatcccaatgcgctttatttatgcgaccctgtaatgccacatccgaaaaaaatctgcgtagttgccaatggcgttcgcgaagcacttattgaaaaagccattccagtggcggatattatgacgccaaacttacacgaattgcgtcagctaaccgaattcccaattaatacctttgacgatgtattaaaagcagtgaatgcgttgattgcaaaaggcgtgaagaaagttctcgttaaacatttaggcagtgcgggtaaaatcaacgatcctgatacatttgaaattattatggcaaccccagagggtgtttggcatttaagccgtccactttatcaattcaactttgaaccagtgggcgtgggcgatttaatcgcaggtacattcttagcgaatttgctcaatggaaaatctgatgttgaagcttttgaagcaatgaataatgaagtggcaggcgtaatgaaaaccacctttgaactgggttcttacgaattacaaacgattgctgcacgttttgaaattcttaatccaagcagcaattataaagctgaaaaagttgcctaatggatttactttcagacattgaaaaacaactccaaaaagccaccgctcaagcatttcttattgccttgagtggtggtttagattccactgtacttctttctttatttgcaaaactttgtcaaaaacaaccgcacttaccgcctttatcaatacgagcaatccatattcatcacggattaagccccaatgccgacagttgggctaaacattgtcaagacttatgcgatcaatttcaaattccattgattattgagcgagtacaagtagataaaactaatggtattgaggctggcgcacgtgaagcacgctatcaagccatcaaaaaatatcttcaaacacaagaaatgctggtcacagcgcatcatctaaacgatcaaactgaaacctttttcttagccctaaaacgtggcagtgggctaaaaggcttaggcgcaatgcaacaacaaagtgtattattcggcatgccaattttacgccctttgttaggctttactcgcacccagttagaaaattacgcgcaaaaagaaaaactcaactggattacagacgaaagtaatgaagataatcgatacgatcgtaatttcttacgcaatgaaattttgccagaattacgtgaacgctgggctcattttgatttagccgtgcaacgttcagcacaacattgttttgagcaacaacagctaattaatgatttattgagcgaaatttttacagaacattgtcaaattaaaaaccaatttaaactgtgccagttccgccaatattctctcgcaaaacagaccgcacttttgcgtatgtggcttgccgaaaaccagcttgaaatgccaagtaaacgccagcttacacagcttattaatgatgtcatttttgcaaaagaagaggcaaatcctcaatttcagcttgtaaataaagttattcgacgttatcaagatagtttatatttaactaagccgttttctgatctaaccaaatgcaccctaaaattagaacaaaatacgctaaatttacccgatgatttaggcaatctcacagttcaagaaaatgaacataatctgattttctactggcaggattactctgttacgctggaaaaaacgaacttgcctatttctattcgttttggctattcgggcaaagtgaaacattatccgaaacgcccaagagaagatataaaaaaaatctggcaagaattaggcgtgccaccttgggaacgaaatcgaatccccttaattttttatggcaacgagctaaaaagtgcggtcggtttttttcgtgttttaaaatcaagttaaagcgactttgtttctaaaaatgcgttcagaatttgagcggtgaattcttttcttagataaaaacctaaaggcaaggtatctataatttcgccattttttcctatgccttttgtcacagcgcgactatttgcaccctttgggcgaagttgcataacttcaccaattcgagcggtaatttgatctaatttgccaagtacaattaaatccatcaattcttcccaatcttgttttaattgacgttcttgctcagcggttggcttccagaaaattggcgcgccgatatggcgttcacgtaatggaatatggcggctgccttcaatgggcatccaaagtacacaagaaagtttatgacgaacgtgggaattttcccatttaacccctgaattttgtaccaacggggcaaggctcacaaaggtggtttcaagag

SEQ ID NO: 385 - DNA, 2640 bp, ARTIFICIAL
  Sequence of the cdsA gene and flanking regions.
agtttaccaccaaatttatagaggtctctcaataataaaaataatgatagagttggatcaaacaaatataccaaaacacgttgccattattatggatggtaatggccgttgggcaaaacagaaaaataaaatgcgaattttcggacacaccaatggcgttactgcggtacgcaaagcagtggcttatgcacgacaaatcggtgtggaagtactcacactttatgcctttagtagcgaaaattggagtcgcccagaacaagaaatcagcgcgttaatgtcgctttttatgcaagccttggatcgcgaagtgaaaaaattacataaaaataatatttgtctgaaaattataggcgatgtatctcgttttagtgaaactttacaagaaaaaatcaaaaaagcggaaaatttaacagaaaaaaataccgcacttacactcaatattgcggcaaattacggcggttgttgggatattattcaagccgctaaacaaattgcagaaaaagttaaaaaagaagaaatgtcagtttcagatattaataactcgacttttcaacatcatcttgcaacccaaaatgcaccacctgtggatttattaattcgcaccagtggagaacagcgcataagcaactttttattatggcaaattgcctatgcggaattatatttttccgatgtgctttggcctgattttaatcaattagaatttaatcgcgcgattgcaagttatcaacaacgtcatcgccgttttggcgggactgaatagttaaacggattaaaattatgcttaaacaacgagttttatctgctattgtgttaattgctgcagttttatgtgcgctatttttattcacacctttttattttgccctcgctttaggggcagtagcgattttaggcatttgggaatggactcaatttgctcgcctaaaacaacctttgatacgtttttttgtgactacctttttaggcgtatttatcttcttatggctctatactgagggcaactatttagatgcagggcgtgtgtttgaacaacatcttcagcttttattgataaatgctgttagctggtggggtttagctttgttacttgtgatcagttaccctaaatcagctaaattttggtctaaaaatccacttttacaacttttatttgccttttctacgttgattccatttgtcgcaggtgtattacgtttacgtttagaacactatacccatgatccttatcacggcttatttttattactttacgtatttatacttgtttgggcggctgattctggtgcttattttagcggacgcgcctttggcaaacgtaaacttgcccctaaagtatcgccaggtaaaagttgggaaggggtcattggtggcttaattacagcattagtgcttgcttttatctttattcatttctctaacaatactttagtaggcgatcgaaatattactggatttatcattctttctgtagccacagttgcaatttcagtattgggcgatttaactgaaagtatgtttaaacgtgagtcaggagttaaagacagcagtcaattaattccaggtcacggcggcgtattagatcgcattgacagcttgactgccgcggtaccttttttcagctatttctatttctttgtcttataaggatttttaatgtcatttttgtggtcactaggttcttttatcattgctattgctgtattagtatccgttcacgaatatggtcacttttgggcagcgagaaagtgcggtataaaagtccatcgtttttccattggttttggaaaagtaatttggaaacgcattgacaaatatggtacagaatttgcggtttcaatgattcctttaggcggctatgtaaaaatgcttgatggacgtaatgaagtagttcctgctgagcaaaaatcacaagcatttgacagtaaaagcgtattacaacggtcatttgtaattattgcaggccctttagctaattttatttttgcaatttttgcttattgggtcatttacctttatggaatgccaacggttaaaccagtgattgaatcaataacaccaaactcaatcgcagcacaagcccacattgaacccaatacgcaaattcttacaattgatggcgaagaaactcaagattgggaaaccatcaatatgctacttgccacaaaaatgggggagcctaatgttgagattagcctttctcctttcaattctaatattgaacaacaacggactttaaatcttacaaattggacattcgatcctgaaaaagaaagtgcttttgaggcattagggattatgcctatgcgtcctaaaattgaaatggtgctttctaaagttgttcaaaattctcccgctgagaaagctggtttacaaatcggtgataaaattttaaaagaaaatttaaccgcacttccttggcaagattttataaaacaggtcgaacaaggcgaatctttttctattaaagttgaacgtaatggagaaacatttgacaaagtcctaactccagtgcgtaatcaaaatggcaaatggtttgttggggttagcccagccttaacaaaattagcggatgaataccgtactgaattaaaatatggtattcttgaatctttacaaaaaggcattgaaaaaacagga

SEQ ID NO: 386 - DNA, 2240 bp, ARTIFICIAL
  Sequence of the pyrH gene and flanking regions.
gccaataagttttaatgcccgcagatttgatgagatctactaaactcaaactgtaattgggttcccatttttctttgtctggaaaggttagcattaaacgaagtgaggcgacggtatttgttcctgctgaacgaaaaccatcaatcaacgtgcctttagcgttagacataaagggggtgttttcaattggataaccgtaggcatggtggtaatctttccgtgcactttctccgagtacaattacataatcatcatagcgtgaattttctaatgttgattttccccagttatcagattgagagatttgttttagtttttgcacttcatctacaatttttaatgtggaacttactgtttctttgagcggttcagcaagcggcatgttgtaagcaaaaagcaatgtcgccaaggcaataaatgttttattacgataaaattttatgccaaatttcaccgcacttttgtactgaagaaaaatcaaaataggaatggcgaaagcaattaagtaactactcactgggatttgcaatagaaattccttcgtttctaatatatctgtcgcgaaaagcgaggcgatatattggtagcttggagggccaaaatttagccctgtaggcgtataaaaagcatgcagtaacgtaagaggtagcaaaataaaatagaaggattttttactgctgcttaataagagaatagttattgtcgcaagcagaatgagagccacacttggttctgtaaacattccagaaccgattaaaataaaataacccgcgaatgcggcacaaatcactgcaaaaagtgcgggcaaaatttggcttgtttttttcgtgttatattgtcttccctgaaaagaaaatgtcgctattatccacctttcactgagaatttccatatttaacttcttcactcttgagcggttattttatagaataagccaattttttaagccagaaggaaaaaacaatgagccaaccaatttataaacgtattttattgaaattaagcggtgaagcattacaaggagaagatggtcttggtatcgatcctgcgattctcgatcgtatggctgttgaaattaaagaattagtggagatgggtgtggaagtcagtgtcgttctcggtggtggcaacttattccgtggcgcaaaactagcaaaagcggggatgaatcgcgtggtgggcgatcatatgggaatgcttgctactgtgatgaatggtttggcaatgcgtgattctttattccgtgctgatgtgaacgcaaaattaatgtccgctttccaattaaatggtatttgcgatacttataactggtctgaagctatcaaaatgttacgcgaaaaacgcgtagtcattttctctgcgggaacgggaaatccattctttaccactgattctaccgcttgtttgcgtggtattgaaattgaagctgatgttgtgttgaaagcgactaaagttgatggtgtgtatgattgtgatcctgcgaaaaatcctgatgcaaaactttataaaaatttaagttatgcagaagtgatcgataaagaattaaaagtgatggacttatcggcgtttactttagctcgcgatcatggcatgccgattagagtgttcaatatgggtaaacctggagcattacgtcaagtagtgactggtactgaagaaggcaccactatttgttagtgaatgttgaaaagaataatattaaagaaaatacataattaaattaaggactaaacttttaattcattgagtttagtctttttaatttaaataaagcattacggcaggaatgaaagttttcgtaaattctgtttagtcttcatagttggattatttagatataaaaatctgcactctaataagtgagaaagttaatcaaacttttagaatgcagattaattttttataaaatttcagtttaagctacagtgagttgtcccgcatataaaataaagaaacgtaaacaaaataccccaattaagtcaaaaattgataccaagataataaagttacgattgtattttaaacggtcatttacaaacatattggcgattaatgggatcaagataccaataatcaatactccaacccagaataccactccccaaaaaccagataaggcattatgtaacgcaactgttttttgtccgccaccaaaatgtaatccaacgaagaaacacacaatcaaaccaagttctgtcaccataattggcacttcaaatttgtggatgaagtgcgattcg

SEQ ID NO: 387 - DNA, 2730 bp, ARTIFICIAL
  Sequence of the coaE gene and flanking regions.
tattttaggtatggatttggctcacggtggtcatttaactcacggtgcaaaagtcagtttctctggcaaaatttataactccgtactttatggaattactgcggatggcttaattgattatgaagatgttcgtcaaaaagcattagaatgtaaaccaaaacttatcgttgctggtttctcggcttattcacaagttgtggattgggcgaaaatgcgtgaaatcgcagatgaagttggtgcgtatttatttgtggatatggcgcatgtagcgggattaattgcagcgggtttatatccaaatccactaccgcatgcacatgttgtgacaacaacaactcacaaaacattgggcggtccgcgtggtggtttaattctttcatcttgtggcgatgaagaaatctacaaaaaattacaatcatccgtattccctgcaaaccaagggggtccattagttcatattattgcggcaaaagcagtttgctttaaaggagcattagagcctcaatataaagaataccaagcaaatgtaatcaaaaatgcaaaagcaatggttgaagtatttaaacaacgtggttatgacgttgtgtcaaatggtactgaaaaccacttgttcttagtaagtttcatcaaacaaggattaacaggtaaagcagcagatgcggcattgggcaaagcaaatattaccgtgaataaaaatgctgtaccaaacgatccgcaaaaaccattcgtcacttctggcatccgtgtaggtacaccatctgtgactcgtcgtggtttcaatgaaaatgatgtgcgtgaattagctggctggatgtgtgatgttttagatgctttaggcaaagaaaatgaagaacaagtgattgctgaaactaaagaaaaagtattagcaatttgtaaacgtcttccagtttatccgaaatgatttattttctttcgttgattatatggttagcggcgattaatatcgccgcttattttttatgggaaattatatgacttatattgttggcttaactggtggcattggtagtggtaaaacaacgattgctaatttatttaccgatcttggcgtacctctagtggatgcggatgtggttgctagagaagtcgtcgcgaaagattcccccttattgtcaaaaattgttgaacattttggggctcaaattttaacggaacaaggcgagcttaatcgcgcggctttacgagagcgagtgtttaaccatgatgaagataaattgtggttaaataaccttctacatcccgctattcgtgaacgaatgaaacaaaaattagctgaacaaactgcgccttacacattatttgtcgtccctttattaatagaaaataaattgaccgcactttgtgatcgtattttggtggtggatgtgagtccacaaactcaacttgctcgttcagctcaacgagataacaataattttgaacaaattcaacgaattatgaattctcaagtttctcaacaagagcgtttgaaatgggcggatgatgtgattaataatgatgctgaactggcccaaaacttaccgcacttgcagcaaaaggtgctagaattgcaccagttttatttacaacaagcggaaaataaaaatgcctgacgaaatgattgaagtaccttgtccgatttgccaaaaatcggtgccttggataaatgaaagtacttttcgacctttttgtagcaaacgttgccagttaattgatcttggcgaatgggcggctgaagaaaaagcgattccaagtgatactgctgattttgcaatggatccaaatgtgagtgacgaatggagcattaaatagagattaaccgataggaaaccctatcggttaatttttataagtgcggtgctttttttgaggatttttcctaaaaatgctatgctaaacgtaattttattattctaaaatgtgatttttatgcaacaagattatttaagccaacaacgattctccgctcttcctctacacccgattgtgcgaggtgctttggcaaaaaaaggctttgatttttgtaccccaattcaggctttatccttgcctatcagtttaaatggacgagatgtcgcaggacaagctcaaactggtacaggcaagacaatggcttttttaacggctacttttcaccatcttttaactcaccaagatcctaatcttaaatatcctcacccaagagctttgattttagcacctactcgagaattagcggtacagattagtaatgacgcagaatttcttgcaaaagcgagtggattaaagaccgcacttgcctatggtggcgatggttatgataaacaactacaagcgattgagcgtggcgtcgatattttgattggtacgacggggcgagtcattgattatgtgaaacaaggcgtaattggtttagatgaaatccaagttgtcgtgctagatgaagcagatcgaatgtttgatcttgggtttatccgtgatattcgttatttattgcgtaaatgccccgctccgcaagctcgtttaacgatgttattttcagcgacgctttcttataaagtgcgtgaattagcatttgaagatatgaatgaacctgaatatattgaaattgaaccagaacaaaaaacagggcaccgaattaaagaagaacttttttatccatctaatcaggataaaatggcacttctcttaaccttaatggaagatgaatggcctgaacgctgtattgtatttgcgaatacgaaacatcgt

SEQ ID NO: 388 - DNA, 2720 bp, ARTIFICIAL
  Sequence of the emrB gene and flanking regions.
agtaatggtatcatcacaagttgcaggtaatgtagcgaagattaatgcagacaatatggataaagtccatgcaggtgatattctagttgaattggatgataccaatgcgaaacttagtttcgaacaggccaaaagcaatctcgccaatgctgtacgtcaggtagaacaactgggtttcactgtgcagcaattgcaatcagctgtgcacgccaatgaaatttctttagctcaagctcaaggcaatttggcgcgccgagttcaacttgaaaaaatgggtgcgattgataaagaatctttccaacacgcaaaagaagctgtcgagcttgccaaagcaaatttaaatgcctctaaaaatcaattggctgctaatcaggctttattgcgtaacgttccattacgtgaacaaccgcaaatacagaatgcgataaactcgcttaaacaggcttggttaaatttgcaacgtacaaaaattagaagtccaattgatggctatgtggcgcgtcgtaatgttcaagttgggcaagccgtttcagtgggtggcgcgttaatggcagtggtatctaatgaacaaatgtggctagaagctaacttcaaagaaacccaattaacgaatatgcgcattggtcagccagtaaaaatccattttgatttatacggtaaaaataaagaatttgatggcgtgataaatggtattgaaatggggactggcaatgcattttctcttttgccttcacaaaatgctacgggtaactggattaaagtggtgcaacgcgtacctgtgcgaattaaattagatccacaacaatttacagaaacgccattgagaattggtctttctgcaacggcaaaagtaagaatttcagattcatcaggcgcaatgctacgagaaaaaacagaaccgaaaacgttattttctactgatacacttaaatatgatgaaagtgcggtagaaaatttgattgaatctatcattcagcaaaacagccattaaggcggcgttatgggcaattccgcaaaaaaattcccgcctattcaaggtggtgcgctgattttattaacgctggctttatctcttgccacctttatgcaggtattagattctaccattgcaaatgtggcaattcctactattgcgggcgatcttggcgcatcttttagtcaaggcacgtgggtaattacttcttttggggtagcaaatgcgatttctattccaataacgggttggttagcaaaacgttttggcgaagtgcggttatttttagtctcaacttttttatttgttgtctcttcttggctctgtgggattgcagatagtcttgaggcgttaattatttttcgcgtcattcaaggtgctgtcgcaggcccagtgatccctctttcgcaaagtttattattaaataattatccaccagaaaaacgcggaatggcattggcattttggtcaatgactattgtggttgcgcctatttttggcccaattttaggcggatggattagcgataatatccattggggatggatcttttttatcaatgttccgatcggtttgtcagttgtgctaatcagctggaagattttgggaagcagagaaagtgaaattgttcatcaacctattgataaagtcggtttagttttacttgtcttaggcgtgggatgtttgcaattaatgcttgatcagggtcgtgagcaagattggtttaattctaatgaaatcattatattagccgttgttgctgtcgtttgtctgattgccttggttatttgggaattgacagatgacaatcctgtagtggatatttcgcttttccattctcgtaattttagcgtagggtgtttatgtactagtttagcctttttgatttatctaggttctgtggtattaattccgctcttgctacaacaagtcttccattacactgcgacgtgggcagggcttgcagcttccccagttggattattcccaattttgctttcaccgattattgggcgtttcggttataagatcgatatgcgaattttagtgacgataagctttattgtatatgcaataacattttattggcgagcggtaactttcgagccatcaatgacatttgttgatgtagctttaccacaattagtgcaaggtttagcggtgtcctgtttctttatgccacttactacaataacgctgtctggcttgcctgcgcataaaatggcttcagcctctagcttatttaactttttgagaactttagcgggttctgtaggaacatctttgaccacatttatgtggtataaccgtgaagctgttcaccacactcaattaacagaacacattaatccttataacccaatttcccaaagtttttaccatcaaatgaatcaatttggtttaagtgatacgcaaacttcagcttacctcgctcaacaaataacatcgcaaggatttattattggcgcaaatgaaatattttggttatccgctatgggattcttaggattgcttattgtgatttggtttgcaaaaccaccttttggtactcagcattaaaataaataaatatatattacataccaatcacaacacaatcggtaacagttttggctctactttgcgcctgtactgcaagctctcgagtatcaaaacttgctacacgaacacggttccattcgccgttagtttgtatttgagcatttaatcctgtcatctgtaaacgaccttgcaaattttcagcttg

SEQ ID NO: 389 - protein, 116 aa, HAEMOPHILUS INFLUENZAE
MSNIIKQLEQEQLKQNVPSFRPGDTLEVKVWVVEGSKRRLQAFEGVVIAIRNRGLHSAFTLRKVSNGVGVERVFQTHSPAVDSIAVKRKGAVRKAKLYYLRERSGKSARIKERLGA

SEQ ID NO: 390 - protein, 82 aa, HAEMOPHILUS INFLUENZAE
MVTIRLSRGGAKKRPFYQIVVADSRSPRDGRFIERVGFFNPIAQGNAERLRINLERVNHWVAQGASLSDRVASLVKEAQKAA

SEQ ID NO: 391 - protein, 229 aa, HAEMOPHILUS INFLUENZAE
MAKLTKKMKAIKAGVDSTKAYEINEAIAVLKQFATAKFVESVDVAVNLGIDPRKSDQNVRGATVLPHGTGREVRVAVFTQGANADAAKEAGADLVGMEDLAEQIKKGEMNFDVVIASPDAMRVVGQLGQVLGPRGLMPNPKVGTVTPNVAEAVKNAKSGQIRYRNDKNGIIHTTIGKANFSEVQLKENLQALLAALNKAKPTTAKGIFIKKVSISTTMGAGVAVDQASL

SEQ ID NO: 392 - protein, 142 aa, HAEMOPHILUS INFLUENZAE
MAKKVQAYVKLQVAAGMANPSPPVGPALGQQGVNIMEFCKAFNARTESLEKGLPIPVVITVYADRSFTFVTKTPPAAVLLKKAAGIKSGSGKPNKDKVGKVTLDQVRQIAETKAADMTGATIETKMKSIAGTARSMGLVVEE

SEQ ID NO: 393 - protein, 71 aa, HAEMOPHILUS INFLUENZAE
MPVIKVRENESFDVALRRFKRSCEKAGILAEVRAREFYEKPTTIRKRENATLAKRHAKRNARENARNTRLY

SEQ ID NO: 394 - protein, 75 aa, HAEMOPHILUS INFLUENZAE
MARYFRRRKFCRFTAENVVEIDYKDIATLKNYISESGKIVPSRITGTRAKYQRQLARAIKRARYLALLPYTDNHQ

SEQ ID NO: 395 - protein, 125 aa, HAEMOPHILUS INFLUENZAE
MRHYEIVFMVHPDQSEQVPGMIERYTGSVKEAGGQVHRLEDWGRRQLAYPINKLHKAHYVLMNVEAPQQVIDELETTFRYNDAVLRSLVIHTKHAVTEASPMKAAKEERKPLAEVENNDFEDAEE

SEQ ID NO: 396 - protein, 156 aa, HAEMOPHILUS INFLUENZAE
MPRRRSVEARKILPDPKFGSELLAKFINVIMVDGKKSVAESIVYGALETLAQRTGKEPLEAFEVALENVRPTVEVKSRRVGGSTYQVPVEVRPVRRNALGMRWIVEAARKRGDKSMALRLANELSDASDNKGAAVKKREDVHRMAEANKAFAHYRW

SEQ ID NO: 397 - protein, 124 aa, HAEMOPHILUS INFLUENZAE
MATINQLVRKPRVKKVVKSNVPALEACPQKRGVCTRVYTTTPKKPNSALRKVCRIRLTNGFEVTSYIGGEGHNLQEHSVVLIRGGRVKDLPGVRYHTVRGALDCAGVKDRKQGRSKYGVKRPKA

SEQ ID NO: 398 - protein, 163 aa, HAEMOPHILUS INFLUENZAE
MALNLQDKQAIVAEVNEAAKGALSAVIADSRGVTVEKMTELRKSAREAGVTMRVVRNTLLRRAVEGTDYECLKDTFVGPTLIAFSNEHPGARARLFKEFAKANDKFEIKGAAFEGKIQDVEFLATLPTYEEAIARLMGTMKEAAAGKLARTFAALRDKLQEAA

SEQ ID NO: 399 - protein, 123 aa, HAEMOPHILUS INFLUENZAE
MSLTNEQIIEAIASKTVTEIVELIAAMEEKFGVSAAAAVAAAPAAGGAAAAEEKTEFDVVLKSAGANKVAVIKAVRGATGLGLKEAKDLVESAPANLKEGVSKEEAEALKKELEEAGAEVEVK

SEQ ID NO: 400 - protein, 118 aa, HAEMOPHILUS INFLUENZAE
MLVFLLAKFYWSSGLMQNQRIRIRLKAFDHRLIDQSTAEIVETAKRTGAQVRGPIPLPTRKERFTVLISPHVNKDARDQYEIRTHKRLVDIVEPTEKTVDALMRLDLAAGVDVQISLG

SEQ ID NO: 401 - protein, 208 aa, HAEMOPHILUS INFLUENZAE
MIGLVGRKVGMTRIFNEDGVSVPVTVIEIEANRVTQVKTLENDGYTAVQVTTGSKKANRVTKPEAGHFVKAGVEAGRGLWEFRTEGEEFTLGQEINVDIFADVKKVDVTGTSKGKGFQGGVKRWNFRTQDATHGNSLSHRVLGSIGQNQTPGRVFKGKKMAGHLGAERVTVQSLEVVRVDAERKLLLVKGSVPGAINGDVIVKPAVKA

SEQ ID NO: 402 - protein, 200 aa, HAEMOPHILUS INFLUENZAE
MELQVVGANALTVSETTFGREFNEALIHQVVVAYAAGARQGTRAQKTRAEVSGSGKKPWRQKGTGRARAGDIKSPIWRSGGTTFAAKPQDHSQKVNKKMYRGAIKSILSELVRQDRLVVVEKFELDAPKTKVLVQKLKDLAVEDALIITASLDENLFLAARNLYKVDVRDVQGIDPVSLIAFDKVIVTVDAVKQIEEILA

SEQ ID NO: 403 - protein, 99 aa, HAEMOPHILUS INFLUENZAE
MSQERLLSVLRAPHISEKATNNAEKSNTVVLKVALDANKAEIAAAVAQLFEVKVDSVRTVVVKGKTKRRGNKMGRRSDWKKAYVTLAEGQNLDFVDSAE

SEQ ID NO: 404 - protein, 273 aa, HAEMOPHILUS INFLUENZAE
MAIVKCKPTSAGRRHVVKIVNPELHKGKPYAPLLDTKSKTGGRNNYGRITTRHIGGGHKQHYRLIDFKRNKLDIPAVVERLEYDPNRSANIALVLYKDGERRYILAPKGLSVGDQIQAGINSPIKVGNSLPMRNIPVGSTVHNVELKPGKGGQIARSAGAYVQIIAREGNYVTLRLRSGEMRKVLAECVATIGEVGNSEHMLRVLGKAGANRWRGIRPTVRGTAMNPVDHPHGGGEGRNFGKHPVTPWGVQTKGKKTRHNKRTDKYIVRRRGK

SEQ ID NO: 405 - protein, 91 aa, HAEMOPHILUS INFLUENZAE
MPRSLKKGPFLDLHLLKKVEKAVESGDKKPIKTWSRRSMIIPSMIGLTIAVHNGRQHVPVYVSDEMIGHKLGEFAPTRTYRGHAADKKAKK

SEQ ID NO: 406 - protein, 110 aa, HAEMOPHILUS INFLUENZAE
METIAKHRYARTSAQKARLVADLIRGKKVAQALEILTFTNKKAAALVKKVLESAIANAEHNDGADIDDLKVAKIFVDEGPSMKRVMPRAKGRADRILKRTSHITVVVSDR

SEQ ID NO: 407 - protein, 235 aa, HAEMOPHILUS INFLUENZAE
MGQKVHPHGIRLGIVKPWSSTWFANTQDFADNLEGDFKVRKFLNKELASASVSRITIERPAKSIRVTIHTARPGIVIGKKGEDVEKLRNAVSKIAGVPAQINIAEVKKPELDAKLVADSIASQLERRVMFRRAMKRAVQSAMRLGAKGIKVEVSGRLGGAEIARSEWYREGRVPLHTLRADIDYNTAEAHTTYGVIGVKVWIFKGEILGGMAAVAQSEQQPADKPKKAPRGKGRK

SEQ ID NO: 408 - protein, 136 aa, HAEMOPHILUS INFLUENZAE
MLQPKRTKFRKVHKGRNRGIASGTEVSFGTYGLKAVGRCRLTARQIEAARRAMSRAVKRQGKIWIRVFPDKPITEKPLEVRMGKGKGNVEYWVALIQPGKVLYEMDGVSEEVARNAFALAAAKLPVKTTFVTKTVM

SEQ ID NO: 409 - protein, 63 aa, HAEMOPHILUS INFLUENZAE
MKAQDLRTKSVEELNAELVNLLGEQFKLRMQTATGQLQQTHQAKQVRRDIARVKTVLTEKAGE

SEQ ID NO: 410 - protein, 85 aa, HAEMOPHILUS INFLUENZAE
MTDKIRSVQGKVVSDKMEKSFVVAIERKVKHPLYGKFIRRTTKLHVHDENNEAKVGDTVEIRECRPLSKTKSWTLVRVVEKAVIA

SEQ ID NO: 411 - protein, 123 aa, HAEMOPHILUS INFLUENZAE
MIQEQTMLDVADNSGARSVMCIKVLGGSHRRYAAIGDIIKITVKEAIPRGKVKKGDVLKAVVVRTKKGVRRPDGSVIRFDGNACVILNNNTEQPIGTRIFGPVTRELRSEKFMKIISLAPEVL

SEQ ID NO: 412 - protein, 103 aa, HAEMOPHILUS INFLUENZAE
MPAKIRQNDEVIVLTGKDKGKRGKVTKVLPNGKVFVEGINIITKHEKPVPALGKAGGLVKKEAAIDASNVAIFNPKTNKADRVGFRFEDGKKVRFFKSNNEII

SEQ ID NO: 413 - protein, 179 aa, HAEMOPHILUS INFLUENZAE
MAKLHDYYRDQVVSELKNKFGYKSVMQVPRIEKITLNMGVGEALTDKKLLDNAVADLAAISGQKPLVTKARKSVAGFKIRQGYPIGCKVTLRGERMWEFFERLITIAVPRIRDFRGLSAKSFDGRGNYSMGVREQIIFPEIDYDKVDRVRGLDITITTTAKNDEEGQALLAAFNFPFRK

SEQ ID NO: 414 - protein, 101 aa, HAEMOPHILUS INFLUENZAE
MAKQSMKARDVKRVKLAEKFYAKRVELKKIISDVNASDEDRWDAVLKLQTLPRDSSPSRQRNRCRQTGRPHGVLRKFGLSRIKVREAAMRGEIPGLKKASW

SEQ ID NO: 415 - protein, 130 aa, HAEMOPHILUS INFLUENZAE
MSMQDPIADMLTRIRNGQAANKVAINMPSSKLKVAIANVLAAEGYIESVKVLEGAKPELEITLKYFQGKPVVESIQRVSRPGLRIYKRKDELPKVMGGLGVAVISTSKGVMTDRAARQAGLGGEIICYVA

SEQ ID NO: 416 - protein, 177 aa, HAEMOPHILUS INFLUENZAE
MSRVAKAPVNIPAGVEVKLDGQLLTVKGKNGELSRKIHESVEVKQDNGQFTFTPREGFVEANAQSGTARALVNAMVIGVTEGFTKKLVLVGVGYRAQLKGNAIALSLGYSHPVEHTLPVGITAECPSQTEIVLKGADKQLIGQVAADIRAYRRPEPYKGKGVRYADEVVRIKEAKKK

SEQ ID NO: 417 - protein, 117 aa, HAEMOPHILUS INFLUENZAE
MDKKSARIRRAARARHMMREQGVTRLVIHRTPRHIYAQVIAPNGSEVLAAASTVEKAIREQVKYTGNKDAAAAVGKAVAERALAKGVQAVAFDRSGFKYHGRVQTLADAAREAGLQF

SEQ ID NO: 418 - protein, 166 aa, HAEMOPHILUS INFLUENZAE
MSNIEKQVGELQEKLIAVNRVSKTVKGGRIMSFTALTVVGDGNGRVGFGYGKAREVPAAIQKAMEKARRNMINVALNEGTLQHPVKGVHTGSRVFMQPASEGTGIIAGGAMRAVLEVAGVRNVLSKAYGSTNPINVVRATIDALANMKSPEMVAAKRGKTVDEILG

SEQ ID NO: 419 - protein, 59 aa, HAEMOPHILUS INFLUENZAE
MAKTIKVTQVRSSIARLPKHKATLRGLGLRHIHHTVELIDTPAVRGMINQVSYMVKVEE

SEQ ID NO: 420 - protein, 144 aa, HAEMOPHILUS INFLUENZAE
MRLNTLSPAEGAKHSAKRLGRGIGSGLGKTGGRGHKGQKSRTGGGVRRGFEGGQMPLYRRLPKFGFTSMKSAVTAEVRLNELTKVEGNVVTLETLKAANILTKDIQFAKVILAGEVKSAVTVRGLRVTKGAKAAIEAAGGSIEE

SEQ ID NO: 421 - protein, 37 aa, HAEMOPHILUS INFLUENZAE
MKVRASVKKMCRNCKIVKREGVVRVLCSDPKHKQRQG

SEQ ID NO: 422 - protein, 122 aa, HAEMOPHILUS INFLUENZAE
MARIAGINIPDHKHAVIALTAIYGIGKTRSQAICAAAGIAEDVKIRELSEEQIDKLRDEVGKFTVEGDLRREVTLNIKRLLDLGCYRGLRHRRSLPVRGQRTKTNARTRKVHVSRSKNSRGK

SEQ ID NO: 423 - protein, 129 aa, HAEMOPHILUS INFLUENZAE
MAKTPVRARKRVKKQVVDGVRHIHASFNNTIVTITDRQGNALAWATAGGSGFRGSRKSTPFAAQVAAERCAEIVKEFGLKNLEVMVKGPGPGRESTIRALNAAGFRITNITDVTPIPHNGCRPPKKRRV

SEQ ID NO: 424 - protein, 206 aa, HAEMOPHILUS INFLUENZAE
MARYLGPKLKLSRREGTDLFLKSGVRAIDSKCKIDTAPGQHGARKPRLSDYGSQLREKQKVRRIYGILERQFRNYYKEANRLKGNTGENLLVLLEGRLDNVVYRMGFATTRAEARQLVSHKAIVVNGRVVNIPSFQVSVNDVVAIREKSKKQARIKASLELAEQREKPTWLEVDSAKMEGVFKRVPERSDLSADINEHLIVELYSK

SEQ ID NO: 425 - protein, 128 aa, HAEMOPHILUS INFLUENZAE
MRHRKSGRQLNRNSSHRQAMFRNLASALVSHEIIKTTLPKAKELRRVVEPLITLAKVDSVANRRLAFARTRNVETVAKLFNELGPRFAQRAGGYTRILKCGFRAGDNAPMAYIELVDRPEVAEATTEE

SEQ ID NO: 426 - protein, 103 aa, HAEMOPHILUS INFLUENZAE
  misc_feature (38)..(38): X is any amino acid
MYAVFQSGGKQHRVSEGQVVRLEKLELATGATVEFDSXLMVVNGEDVKIGAPVVAGAKVVAEVVAQGRGEKVKIVKFRRRKHSRKQQGHRQWFTEVKITGIQA

SEQ ID NO: 427 - protein, 251 aa, HAEMOPHILUS INFLUENZAE
MEAQPQQKENIMAQVSMRDMINAGVHFGHQTRYWNPQMKPFIFGARNGVHIINLEKTLPLFNEALAELTRIASNNGKVLFVGTKRAASEAVQAAALDCQQYYVNHRWLGGMLTNWKTVRQSIKRLKDLETQSQDGTFDKLTKKEALMRSREMEKLELSLGGIKDMGGLPDALFVIGADHEHIAVKEANNLGIPVFAIVDTNSTPAGVDFVIPGNDDATRAIQLYVSAAAAAVKEGRGNEAQVAEELAADAE

SEQ ID NO: 428 - protein, 78 aa, HAEMOPHILUS INFLUENZAE
MSRVCQVTGKRPAVGNNRSHAMNATRRRFLPNLHTHRFWVESENRFVTLRLTAKGMRIIDKKGIDAVLAEIRARGEKI

SEQ ID NO: 429 - protein, 89 aa, HAEMOPHILUS INFLUENZAE
MTLANIKSAKKRAVQSEKRRQHNASQRSMMRTYIKKVYAQVAAGEKSAAEAAFVEMQKVVDRMASKGLIHANKAANHKSKLAAQIKKLA

SEQ ID NO: 430 - protein, 44 aa, HAEMOPHILUS INFLUENZAE
MKRTFQPSVLKRSRTHGFRARMATKNGRQVLARRRAKGRKSLSA

SEQ ID NO: 431 - protein, 549 aa, HAEMOPHILUS INFLUENZAE
  misc_feature (113)..(113): X is any amino acid
MSESFAQLFEESLKVLETRQGSIVSGTVVAIQKGFVLVDAGLKSESAIPVAEFLNAQGELEIQVGDTVNVALDAVEDGFGETKLSREKAVRHESWIELEKAYEEKATVIGLIXGKVKGGFTVELNGVRAFLPGSLVDTRPAREADHLLGKELEFKVIKLDQKRNNVVVSRRAVIESENSQEREQVLENLVEGSEVKGVVKNLTEYGAFVDLGGVDGLLHITDMAWKRVKHPSEIVNVGDEVTVKVLKFDKDRTRVSLGLKQLGQDPWAAIAENHPVNSKLTGKVTNLTDYGCFVEILDGVEGLVHVSEMDWTNKNIHPSKVVSLGDTVEVMVLEIDEERRRISLGLKQCKANPWTQFADTHNKGDKVTGKIKSITDFGIFIGLEGGIDGLVHLSDISWSISGEEAVRQYKKGDEVSAVVLAVDAVKERISLGIKQLEEDPFNNFVAINKKGAVVSATVVEADAKGAKVELAGGVEGYIRSADLTSEVAVGDVVEAKYTGVDRKSRIVHLSVKAKDQAEEAAAVASVNNKQEDIVIPNAMAEAFKAAKGE

SEQ ID NO: 432 - protein, 89 aa, HAEMOPHILUS INFLUENZAE
MLPSNFISSPDYVVLNEKCGVILTMPKIKTVRGAAKRFKKTASGGFKRKQSHLRHILTKKTTKRKRHLRHKSMVAKADQVLVVACLPYA

SEQ ID NO: 433 - protein, 117 aa, HAEMOPHILUS INFLUENZAE
MARVKRGVIARARHKKVLKAAKGYYGARSRVYRVAFQAVIKAGQYAYRDRRQRKRQFRQLWIARINAAARQNGLSYSKFINGLKKASVEIDRKILADIAVFDKVAFAALVEKAKSAL

SEQ ID NO: 434 - protein, 89 aa, HAEMOPHILUS INFLUENZAE
MSLSTEKKAAIVAEFGRDAKDTGSSEVQIALLTAQINHLQTHFAEHKKDHHGRRGLLRMVSRRRKLLDYLKRTDLALYQSTIARLGLRR

SEQ ID NO: 435 - protein, 130 aa, HAEMOPHILUS INFLUENZAE
  misc_feature (56)..(56): X is any amino acid
MAENQNYGTGRRKSSSARVFIKPGSGKITINQRELDVYFGRETARMVVRQPLELVXLTDKLDLYITVKGGGISGQAGAIRHGITRALMEYDETLRPALRAAGFVTRDARRVERKKVGLHKARRRPQYSKR

SEQ ID NO: 436 - protein, 142 aa, HAEMOPHILUS INFLUENZAE
MKTFVAKPETVKRDWYVVDATGKTLGRLATELARRLRGKHKAEYTPHVDTGDYIIVINADKVAVTGRKETDKLYYWHTGYVGGIKQATFKEMIARRPEAVIEIAVKGMLPKGPLGRAMFRKLKVYAGGEHQHAAQQPQVLDI

SEQ ID NO: 437 - protein, 95 aa, HAEMOPHILUS INFLUENZAE
MAFKFNAEVRTAQGKGASRRLRHNGQIPAIVYGGSEEPVSIILNHDELNNAQAHESFYSEVITLVVEGKEVAVKVQAMQRHPFKPKLVHIDFKRA

SEQ ID NO: 438 - protein, 430 aa, HAEMOPHILUS INFLUENZAE
MDLLSDIEKQLQKATAQAFLIALSGGLDSTVLLSLFAKLCQKQPHLPPLSIRAIHIHHGLSPNADSWAKHCQDLCDQFQIPLIIERVQVDKTNGIEAGAREARYQAIKKYLQTQEMLVTAHHLNDQTETFFLALKRGSGLKGLGAMQQQSVLFGMPILRPLLGFTRTQLENYAQKEKLNWITDESNEDNRYDRNFLRNEILPELRERWAHFDLAVQRSAQHCFEQQQLINDLLSEIFTEHCQIKNQFKLCQFRQYSLAKQTALLRMWLAENQLEMPSKRQLTQLINDVIFAKEEANPQFQLVNKVIRRYQDSLYLTKPFSDLTKCTLKLEQNTLNLPDDLGNLTVQENEHNLIFYWQDYSVTLEKTNLPISIRFGYSGKVKHYPKRPREDIKKIWQELGVPPWERNRIPLIFYGNELKSAVGFFRVLKSS

SEQ ID NO: 439 - protein, 1159 aa, HAEMOPHILUS INFLUENZAE
MSSQPRFIHLRTHTDFSMIDSIVKVKPLVKACAANEMVAMGLTDFTNFCGVVSFYSEMLSSGMKPIIGADVKVKSPLCGDEYFDLTLLAKNNEGYRNITLLLSKAYQRGYNDLPYIDQDWLIEHRDGVIILSGGTQGDVGKKLLKENVAEIESAVAFYQEFFADHFYLALSRTGRPNEERYIQAALKLAERCDLPLVATNDVMFLNTEDFEAHEIRVAIHDGYTLDDPKRPKCYTSQQYFRSEEDMCKLFADIPSALENTLLIAQRCSVTLRLGQYFLPQFPTGDLSTEDFLVQKSKEGLEERLVFLFPDEKVRLEKRPKYDERLQVELDVINQMGFPGYFLIVMEFIQWSKDNDIPVGPGRGSGAGSLVAYALKITDLDPLEFDLLFERFLNPERVSMPDFDVDFCMDGRDRVIEHVAETYGRGAVSQIITFGTMAAKAVIRDVGRVLGHPYGFVDRISKLIPPDPGMTLAKAFETEPQLQTAYDSDEEVRALINMARKLEGVTRNAGKHAGGVVISPTLITDFAPLYCDNEGLHPVTHFDKNDVEYAGLVKFDFLGLRTLTIIKWALDIINVRMVREGKPRVDIAAIPLDDPESFELLKRSETTAVFQLESRGMKDLIKRLQPDCFEDIIALVALFRPGPLQSGMVDNFIDRKHGREEVSYPDAEYQHASLKPILEPTYGIILYQEQVMQIAQVLAGYTLGGADLLRRAMGKKKPEEMAKQRLVFKEGAEKNGIDGELSMKIFDLVEKFAGYGFNKSHSAAYALVSYQTLWLKTHFPAEFMAAVMTSEMDNTDKIVGLYDECLRMGLKVTPPDINIGKHHFSVNEQGEIVYGIGAIKGVGEGPIEALVAARNEGGIFKDLFDLCARVDLKKINRRTFESLIMSGAFDKLGPHRAALSKNLEDALRASDQHAKDEAMGQTDMFGVLTETHEDVENAYANTPPYTEKQILDGERETLGLYLSSHPVSRYLKELSHYTSTRLKDLAPNRRGQISTVAGLVVASRIAMTKKGNRLGIATLDDRSGRLDLTLFGESLEQFGEKLQKDTVIVASGQVSFDDFSGGLKMTVRELMTLDEARSRYVKSLAISLSEHQITPSFIKQFKALLEPVSGGTLPINVYYQSPKGRALLRLGVQWSIIPTDEILTELVNLLGESAVELEFE

SEQ ID NO: 440 - protein, 288 aa, HAEMOPHILUS INFLUENZAE
MLKQRVLSAIVLIAAVLCALFLFTPFYFALALGAVAILGIWEWTQFARLKQPLIRFFVTTFLGVFIFLWLYTEGNYLDAGRVFEQHLQLLLINAVSWWGLALLLVISYPKSAKFWSKNPLLQLLFAFSTLIPFVAGVLRLRLEHYTHDPYHGLFLLLYVFILVWAADSGAYFSGRAFGKRKLAPKVSPGKSWEGVIGGLITALVLAFIFIHFSNNTLVGDRNITGFIILSVATVAISVLGDLTESMFKRESGVKDSSQLIPGHGGVLDRIDSLTAAVPFFSYFYFFVL

SEQ ID NO: 441 - protein, 210 aa, HAEMOPHILUS INFLUENZAE
MGNYMTYIVGLTGGIGSGKTTIANLFTDLGVPLVDADVVAREVVAKDSPLLSKIVEHFGAQILTEQGELNRAALRERVFNHDEDKLWLNNLLHPAIRERMKQKLAEQTAPYTLFVVPLLIENKLTALCDRILVVDVSPQTQLARSAQRDNNNFEQIQRIMNSQVSQQERLKWADDVINNDAELAQNLPHLQQKVLELHQFYLQQAENKNA

SEQ ID NO: 442 - protein, 510 aa, HAEMOPHILUS INFLUENZAE
MGNSAKKFPPIQGGALILLTLALSLATFMQVLDSTIANVAIPTIAGDLGASFSQGTWVITSFGVANAISIPITGWLAKRFGEVRLFLVSTFLFVVSSWLCGIADSLEALIIFRVIQGAVAGPVIPLSQSLLLNNYPPEKRGMALAFWSMTIVVAPIFGPILGGWISDNIHWGWIFFINVPIGLSVVLISWKILGSRESEIVHQPIDKVGLVLLVLGVGCLQLMLDQGREQDWFNSNEIIILAVVAVVCLIALVIWELTDDNPVVDISLFHSRNFSVGCLCTSLAFLIYLGSVVLIPLLLQQVFHYTATWAGLAASPVGLFPILLSPIIGRFGYKIDMRILVTISFIVYAITFYWRAVTFEPSMTFVDVALPQLVQGLAVSCFFMPLTTITLSGLPAHKMASASSLFNFLRTLAGSVGTSLTTFMWYNREAVHHTQLTEHINPYNPISQSFYHQMNQFGLSDTQTSAYLAQQITSQGFIIGANEIFWLSAMGFLGLLIVIWFAKPPFGTQH

SEQ ID NO: 443 - protein, 237 aa, HAEMOPHILUS INFLUENZAE
MSQPIYKRILLKLSGEALQGEDGLGIDPAILDRMAVEIKELVEMGVEVSVVLGGGNLFRGAKLAKAGMNRVVGDHMGMLATVMNGLAMRDSLFRADVNAKLMSAFQLNGICDTYNWSEAIKMLREKRVVIFSAGTGNPFFTTDSTACLRGIEIEADVVLKATKVDGVYDCDPAKNPDAKLYKNLSYAEVIDKELKVMDLSAFTLARDHGMPIRVFNMGKPGALRQVVTGTEEGTTIC

SEQ ID NO: 444 - DNA, 351 bp, HAEMOPHILUS INFLUENZAE
atgtctaacattatcaaacaacttgaacaagaacaattaaaacaaaacgtacctagcttccgcccaggtgatactttagaagttaaagtatgggtggttgaaggtagcaaacgtcgtttgcaagcattcgaaggcgtggttattgcaattcgtaaccgtggcttgcactcagcatttactttacgtaaagtatctaacggcgtaggcgttgagcgtgtattccaaactcactctccagctgtagattctatcgcagttaaacgtaaaggtgcggtacgtaaagctaaactttactacttacgtgaacgttcaggtaaatcagctcgtattaaagagcgtttaggcgcataa

SEQ ID NO: 445 - DNA, 249 bp, HAEMOPHILUS INFLUENZAE
atggtaaccattcgtttatctcgtggcggagctaaaaaacgcccattttatcaaatcgtagtcgctgacagtcgttcacctcgtgacggtcgcttcattgaacgtgtaggtttcttcaatccaattgcacaaggtaatgcagaacgtcttcgcattaatcttgagcgtgtaaatcactgggttgctcaaggtgcttcactttctgatcgtgttgcgagcttggtaaaagaagcacaaaaagcagcataa

SEQ ID NO: 446 - DNA, 690 bp, HAEMOPHILUS INFLUENZAE
atggctaaattgactaaaaaaatgaaagcaatcaaagctggcgtagattctactaaagcatacgaaattaacgaagcgattgcggtattaaaacaattcgcaacggctaaattcgttgaaagtgttgatgttgcagtaaacttaggtatcgatcctcgtaaatctgaccaaaacgttcgtggtgcaactgtattaccacacggtactggtcgtgaagtacgtgtagctgtgttcactcaaggtgctaacgcagatgcagctaaagaagctggtgctgatttagtaggtatggaagatttagcagagcaaatcaaaaaaggcgaaatgaactttgatgttgttatcgcttctcctgatgcaatgcgtgttgttggtcaattaggtcaagtattaggcccacgtggtttaatgccaaaccctaaagttggtactgtaacaccaaacgttgctgaagcagttaaaaatgctaaatctggtcagatccgttatcgtaatgataaaaacggtatcatccacaccactatcggtaaagcaaacttctctgaagttcaattaaaagaaaatcttcaagcattattggctgctttaaataaagcaaaaccaactactgctaaaggtattttcatcaagaaagtaagcatctctaccactatgggtgcaggtgttgctgttgatcaagcttctttataa

SEQ ID NO: 447 - DNA, 429 bp, HAEMOPHILUS INFLUENZAE
atggcaaaaaaagtccaagcctatgttaagttgcaagttgcagctggtatggctaacccatcaccaccagttggtcctgcattaggtcagcaaggtgtgaacattatggaattctgtaaagcattcaacgctcgtactgagagcttagaaaaaggtttaccaattccagttgttatcactgtatatgcagaccgttcatttactttcgtcactaaaactccaccagcagcagtattattgaaaaaagctgcaggtatcaaatctggttctggtaaaccgaacaaagataaagtgggtaaagtaactttagatcaagttcgtcaaatcgctgaaactaaagcagcagatatgactggtgcgactatcgaaacgaaaatgaaatcaatcgctggtactgctcgttcaatgggcttagtggtggaggaataa

SEQ ID NO: 448 - DNA, 216 bp, HAEMOPHILUS INFLUENZAE
atgcctgtaattaaagtacgtgaaaacgaatcatttgacgtagctttacgtcgtttcaaacgctcttgcgaaaaagcgggaatcttagctgaagtacgcgctcgcgaattttacgaaaaaccaactacaattcgtaaacgtgaaaatgcaacacttgcaaaacgtcacgcaaaacgcaacgctcgcgaaaacgcgcgcaatacccgtttatactaa

SEQ ID NO: 449 - DNA, 228 bp, HAEMOPHILUS INFLUENZAE
atggcacgttatttccgtcgtcgtaagttctgccgtttcacagcggaaaatgttgttgaaatcgattacaaagatatcgctacattaaagaactatatttcagaaagcggcaaaattgtacctagccgtattaccggtactcgtgcgaagtaccaacgtcaattagctcgtgcaatcaaacgcgctcgctatttagcgttacttccatacactgacaatcatcagtaa

SEQ ID NO: 450 - DNA, 378 bp, HAEMOPHILUS INFLUENZAE
atgcgtcactacgaaatcgtgtttatggttcatccggaccaaagcgagcaagtaccaggtatgatcgaacgttacaccggttctgtaaaagaagctggtggtcaagttcatcgcctagaagattggggtcgtcgccaattagcgtacccaattaataaattacacaaagcacattatgtgcttatgaatgtagaagcgcctcaacaagtcatcgacgagctagaaacgactttccgttataacgatgctgtattacgcagtcttgttatccatactaagcacgccgtaaccgaagcgtccccaatgaaagcggctaaagaagaacgtaaacctttagctgaagttgaaaacaacgattttgaggatgctgaagagtaa

SEQ ID NO: 451 - DNA, 471 bp, HAEMOPHILUS INFLUENZAE
atgccacgtcgtcgtagtgttgaagcacgcaagattcttccagatccgaagttcggttcagaattacttgcaaaatttattaatgtaatcatggtagacggtaaaaaatccgttgctgaatcaatcgtttatggtgctttagaaactttagcacaacgcacaggtaaagagcctttagaagcgtttgaagttgcacttgaaaatgtacgtccaactgttgaggttaaatctcgtcgcgttggtggttctacttaccaagtaccagttgaagtgcgccctgtacgtcgtaacgcattaggtatgcgttggatcgttgaagcagcacgtaaacgtggtgataaatcaatggctttacgccttgcgaacgaattatctgatgcttcagataataaaggtgcagcagtgaaaaaacgtgaagacgttcaccgcatggctgaagctaacaaagcatttgctcactaccgttggtaa

SEQ ID NO: 452 - DNA, 360 bp, HAEMOPHILUS INFLUENZAE
atggcaactatcaaccagctagtacgcaaaccgcgtgtgaaaaaggttgtaaaaagcaacgttcctgcattagaggcttgcccgcagaaacgtggtgtatgtactcgtgtatatactacaactcctaaaaaaccaaactctgcgttacgtaaagtatgtcgtatccgcttaactaacggttttgaagtaacttcttatatcggtggtgaaggtcataaccttcaagagcacagtgttgtattaatccgtggtggtcgtgttaaagacttaccgggtgtgcgttaccacacagtacgcggtgcattagactgcgcaggcgttaaagatcgtaaacaaggtcgttctaaatacggcgttaaa

SEQ ID NO: 453 - DNA, 492 bp, HAEMOPHILUS INFLUENZAE
atggcattaaatcttcaagacaaacaagcaattgttgctgaagtaaatgaagcagccaaaggtgcactttcagcagtaatcgcggattctcgcggtgtaactgttgagaaaatgactgaattacgtaaatcagcacgtgaagctggtgttacaatgcgtgtagttcgtaatactttattacgtcgcgcagttgaaggcacagattacgaatgcttaaaagatacgtttgtaggtccaacacttatcgcgttctctaacgaacacccgggcgcacgtgctcgtttgttcaaagagtttgctaaagcaaacgataagtttgaaattaaaggtgcagcctttgaaggtaaaatccaagatgttgaattcttggcaacattaccaacttacgaagaagcgattgcacgtttaatgggcacaatgaaagaagctgcagcaggcaaacttgctcgcaccttcgcggcattacgcgacaaattacaagaagcagcttaa

SEQ ID NO: 454 - DNA, 372 bp, HAEMOPHILUS INFLUENZAE
atgtcattaactaacgaacaaatcattgaagcgattgcttcaaaaactgtaactgaaatcgttgaattaatcgcagcgatggaagaaaaattcggtgtttcagcagcggcagcagtagcagcagctccagcagcaggcggtgcagcggcagcagaagaaaaaactgaattcgacgttgtacttaaatctgcaggtgcgaacaaagtagcagtaattaaagcagtacgtggtgcaactggtttaggcttaaaagaagctaaagatttagttgaatctgctccagctaacttaaaagaaggcgtttctaaagaagaagctgaagcacttaagaaagaattagaagaagcgggtgcagaagtagaagttaaataa

SEQ ID NO: 455 - DNA, 357 bp, HAEMOPHILUS INFLUENZAE
gtgttagtttttttattagctaaattttattggagctctggtctaatgcagaaccaaagaatccgtatccgcttaaaagctttcgatcaccgtttgatcgatcaatctactgcggagatcgtagaaacagctaaacgtactggcgcacaagttcgtggtccaattcctttaccaactcgtaaagagcgtttcaccgtgttgatttctccacacgtaaacaaagacgcacgtgaccaatacgaaattcgtactcacaaacgtttagtagatatcgtagagccaacagaaaaaactgttgatgcattaatgcgtttagatttggctgccggcgtggacgtgcagatcagcctaggttaa

SEQ ID NO: 456 - DNA, 627 bp, HAEMOPHILUS INFLUENZAE
atgattggtttagtcggtcgtaaagttggtatgacccgtatcttcaatgaagacggcgtgtcagtaccagttaccgttatcgaaattgaagccaaccgcgtaactcaagttaaaactcttgaaaacgatggctatactgcagttcaagttactactggttctaaaaaagcgaatcgtgtaactaaacctgaagcaggtcatttcgtgaaagcaggtgttgaagctggtcgcggtttatgggaatttcgtactgaaggtgaagaattcactttaggtcaagaaatcaatgtagacatctttgcagatgttaaaaaagtagatgttactggtacttctaaaggtaaaggtttccaaggtggtgttaaacgttggaacttccgtactcaagatgctacacacggtaactctttatcacatcgtgtacttggttctattggtcaaaaccaaacaccaggtcgtgtgtttaaaggtaaaaaaatggcaggacatttaggtgctgaacgtgtaactgttcaatcacttgaagttgttcgtgtagatgctgagcgtaaattgctattagtaaaaggttctgtacctggtgctatcaatggcgatgttatcgttaagccggcagttaaagcataa

SEQ ID NO: 457 - DNA, 603 bp, HAEMOPHILUS INFLUENZAE
atggaattacaagttgtaggtgcaaacgcactcactgtttctgaaactaccttcggacgtgagtttaacgaagcgttgatccaccaagttgttgttgcttatgcagcaggtgcgcgtcaaggtactcgtgcacaaaaaactcgtgctgaagtgtctggttcaggtaaaaaaccttggcgtcaaaaaggtacaggtcgtgctcgtgctggtgatatcaaatcaccaatctggcgttctggtggtacaaccttcgcggctaaaccacaagatcacagccaaaaagtgaacaagaaaatgtaccgtggtgctatcaaaagcattctttctgaattagttcgtcaagaccgtttggttgtggtggaaaaatttgaattagatgcaccaaagactaaagttttagtacaaaaattaaaagatttagccgttgaagatgcgttaattatcacagcaagtttagatgaaaatctattcttagcagcacgtaacttatataaagttgatgtccgtgatgttcaaggtatcgatccagttagcttgatcgctttcgataaggtgattgttactgttgatgctgtgaaacaaattgaggagatcctagcatga

SEQ ID NO: 458 - DNA, 300 bp, HAEMOPHILUS INFLUENZAE
atgagtcaagaacgtttgctaagtgtgctacgtgcaccgcacatctctgaaaaagcaactaacaatgctgaaaaatctaacactgttgtacttaaagttgctttagatgcgaacaaagctgaaattgctgctgcggttgctcaattatttgaagtaaaagtagattcagttcgtactgtggttgttaaaggtaaaactaaacgccgtggtaacaaaatgggtcgtcgcagcgactggaaaaaagcttatgtaactttagccgaaggccaaaacttggacttcgtggacagtgcagagtaa

SEQ ID NO: 459 - DNA, 822 bp, HAEMOPHILUS INFLUENZAE
atggctatcgttaaatgtaagccgacctccgctggtcgtcgtcacgttgttaaaatcgtgaaccctgaattacacaagggtaaaccttacgcacctcttctagatactaaatctaaaactggtggtcgtaacaactatggtcgtattactactcgtcacattggtggcggtcacaaacaacactaccgtttaatagatttcaaacgtaacaagttagacattccagcggttgttgagcgtttagaatatgatccaaaccgttctgctaacattgctttagtgctttataaagacggtgaacgccgttatattttagcacctaaaggtttgtcagtaggcgatcaaatccaagctggcataaactcaccaattaaagtgggtaactcattaccaatgcgtaatatcccagttggttcaacagtacataacgttgaattaaaaccaggtaaaggcggtcaaatcgctcgttctgctggtgcttatgtacaaatcatcgcacgtgaaggcaactatgtaactttacgtttacgttctggtgaaatgcgtaaagtattagctgaatgtgttgctacaatcggtgaagttggtaactcagaacatatgcttcgcgtattgggtaaagctggtgctaaccgctggagaggtattcgccctacagttcgtggtactgcaatgaacccagtagatcacccacacggtggtggtgaaggtcgtaactttggtaaacacccagtaactccttggggcgttcaaactaaaggtaagaaaactcgtcacaacaaacgtactgataaatatatcgtacgtcgtcgtggcaaataa

SEQ ID NO: 460 - DNA, 276 bp, HAEMOPHILUS INFLUENZAE
atgccacgttctctcaagaagggtcctttccttgacctacacttgttgaagaaggtagagaaggcggtggaaagcggggataaaaaaccaattaaaacttggtcccgtcgttcaatgatcattccatcaatgatcggattgaccatcgcagtccataatggtcgtcagcacgttcctgtttatgtatctgatgaaatgatcggtcataagcttggtgaatttgcaccgactcgtacataccgcggtcacgcggcagataagaaagctaagaaataa

SEQ ID NO: 461 - DNA, 333 bp, HAEMOPHILUS INFLUENZAE
atggaaactatcgcaaaacatcgttacgctcgcacttctgcccaaaaagctcgcttagttgccgatttaattcgtggtaaaaaagttgcgcaagcattagaaattttaactttcactaacaaaaaagcagcagctttagtgaagaaagttttagaatcagctattgcaaatgcagagcacaatgacggtgcagatattgatgatcttaaagttgctaaaatcttcgttgatgaaggtcctagcatgaaacgtgttatgccacgtgctaaaggtcgtgcagatcgtattttaaaacgtactagccacattactgtggttgtgtcagatcgttaa

SEQ ID NO: 462 - DNA, 708 bp, HAEMOPHILUS INFLUENZAE
atgggtcaaaaagtacatccacatggtattcgcctaggtattgttaaaccttggagctctacttggttcgcgaatacacaagacttcgctgacaatcttgaaggcgatttcaaagtacgcaaattcttaaataaagaattagcaagtgcttcagtttcacgtattactattgagcgtccagctaaaagtattcgtgtaactattcacacagctcgtcctggtatcgtaatcggtaaaaaaggcgaagatgttgaaaaattacgtaacgcagtgtctaaaatcgctggcgttcctgctcaaatcaacattgctgaagtgaaaaaacctgaattagatgcgaaattagttgcagatagcatcgcttctcaattagaacgtcgtgtaatgttccgtcgtgcaatgaaacgtgcggtacaaagtgctatgcgtttaggtgctaaaggtatcaaagttgaggttagcggtcgtttaggtggtgcagaaatcgcacgttcagaatggtatcgtgaaggtcgcgtacctctacatactcttcgtgcggacatcgattataacactgcagaagctcacacaacttacggcgtaatcggcgttaaagtgtggatcttcaaaggtgaaattcttggtggaatggctgccgttgcgcaatcagaacaacaacctgccgacaagcctaaaaaggctcctcgcggtaaaggtcgtaagtaa

SEQ ID NO: 463 - DNA, 411 bp, HAEMOPHILUS INFLUENZAE
atgttgcaaccaaaacgtacaaaattccgtaaagttcacaaaggccgcaaccgtggtatcgcgagcggtactgaagttagtttcggtacttacggtttaaaagcagttggtcgttgtcgtttaaccgctcgtcaaatcgaagcggcacgtcgtgcaatgtcacgtgcagtaaaacgtcaaggtaaaatctggattcgtgtattcccagataaaccaattactgaaaaaccattagaagtccgtatgggtaaaggtaaaggtaacgttgagtactgggtagccttaatccaaccgggtaaagtgctttatgaaatggatggtgtgtctgaagaagtagcaagaaacgcatttgcattagcagctgctaaattgccagttaagaccactttcgtaactaagacggtgatgtaa

SEQ ID NO: 464 - DNA, 192 bp, HAEMOPHILUS INFLUENZAE
atgaaagctcaagatttacgtacaaaaagtgttgaagagctgaatgctgaattagtaaaccttttaggtgaacaattcaagttgcgtatgcagacagccaccggtcagcttcaacaaacccatcaggctaagcaagtgcgtcgtgatattgcacgtgtaaaaactgtattaaccgaaaaggcgggtgagtaa

SEQ ID NO: 465 - DNA, 258 bp, HAEMOPHILUS INFLUENZAE
atgactgataaaattcgtagcgtacaaggtaaagttgttagcgacaaaatggaaaaatctttcgttgttgctattgaacgtaaggtaaaacaccctttatatggtaaatttatccgtcgtacaactaaattacacgtacacgatgagaacaatgaagccaaagttggtgataccgtagagattcgcgaatgtcgccctctatcaaaaaccaaatcttggactttagttcgtgttgttgagaaagcagttattgcttaa

SEQ ID NO: 466 - DNA, 372 bp, HAEMOPHILUS INFLUENZAE
atgatccaagaacagactatgctggatgttgctgataattcaggcgctcgcagcgtaatgtgtatcaaggttctaggtggatcgcaccgtcgttatgctgcgattggcgacatcatcaaaattactgtaaaagaagcaattccacgcggtaaagtaaaaaaaggtgatgtattaaaagcagttgttgtgcgcaccaagaagggtgttcgtcgcccagatggctcagttattcgtttcgatggtaacgcttgtgtaattttaaataataacactgagcaaccaatcggtactcgtatttttggaccagtgactcgtgaacttcgttctgagaaattcatgaagatcatttctttagctccagaagtactgtaa

SEQ ID NO: 467 - DNA, 312 bp, HAEMOPHILUS INFLUENZAE
atgcctgctaaaatccgtcaaaatgatgaagtaattgtccttactggtaaagataagggcaagcgtggcaaggtaactaaagtgttaccaaacggtaaagtgtttgttgaaggtatcaacatcattactaaacatgaaaaaccagttcctgcattaggaaaggctggtggtttggtgaaaaaagaagctgcaattgacgcttcaaatgttgcgattttcaatcctaaaacaaataaagctgaccgtgtaggttttagattcgaagacggcaaaaaagtacgtttcttcaaatctaacaatgaaattatctaa

SEQ ID NO: 468 - DNA, 540 bp, HAEMOPHILUS INFLUENZAE
atggcgaaactgcatgattactacagagatcaagtagtaagcgaattaaaaaataaattcggctacaaatctgtcatgcaagtcccacgaatcgaaaagattaccctgaatatgggtgtgggtgaagcattgaccgacaaaaaattgctagacaacgcagtagcggacttagcagcaatcagcggtcaaaaacctttagtaactaaagctcgtaaatctgttgctggctttaaaatccgtcagggatatccaatcggttgtaaagtaacactacgcggtgagcgtatgtgggagttctttgaacgtttaattacaattgctgttccacgtattcgtgacttccgcggtttaagtgcgaaatcattcgatggtcgtggtaactatagcatgggtgtgcgtgaacaaatcatcttccctgaaattgattacgataaagtagatcgtgtacgtggtttagatatcactatcacaactactgctaagaatgatgaagaaggtcaagcactacttgctgcctttaatttcccattccgtaaataa

SEQ ID NO: 469 - DNA, 306 bp, HAEMOPHILUS INFLUENZAE
atggctaaacaatcaatgaaagcacgcgatgtaaaacgcgttaaattggctgaaaaattctacgcaaaacgtgttgaattaaagaaaatcatttctgatgtcaatgcctctgatgaagatcgttgggatgcagtgttaaagttacaaactttaccacgtgattctagcccatctcgtcaacgtaaccgttgccgccaaactggacgtcctcatggcgttttacgtaagtttggtttaagccgaattaaggttcgtgaagctgcaatgcgcggtgaaatcccaggccttaaaaaagcgagctggtaa

SEQ ID NO: 470 - DNA, 393 bp, HAEMOPHILUS INFLUENZAE
atgagtatgcaagatccaatcgcagatatgctgacccgtattcgtaacggtcaagctgcgaacaaagttgcaatcaatatgccttcttccaagctaaaagtggcaattgccaacgtattagctgctgaaggttatatcgaaagcgtaaaagttttagaaggtgctaaacctgaattggaaattactttaaaatatttccaaggcaaaccagttgtagaaagcatccaacgtgtaagtcgtcctggtcttcgtatttacaaacgtaaagatgaattaccaaaagttatgggcggtttaggtgttgcagttatttctacatctaaaggtgttatgactgaccgcgctgctcgtcaagcaggtttaggcggtgagatcatctgttatgtagcttaa

SEQ ID NO: 471 - DNA, 534 bp, HAEMOPHILUS INFLUENZAE
atgtctcgtgttgcaaaggcacctgttaatattcctgccggcgttgaagttaaactcgacggtcagctattaacagtaaaaggtaaaaatggcgagttatctcgcaaaattcatgaatcagttgaagtaaaacaagataacggacaatttacgttcactccacgtgaaggttttgttgaagcaaatgctcaatcgggtactgcacgtgcattagttaatgcaatggttatcggtgttactgaaggtttcactaaaaaattagtattggtgggtgtaggttacagagctcaacttaaaggtaacgcaattgcattaagtttaggctattctcacccagtagagcacactttgccggtaggtattactgcagaatgtccatctcaaaccgaaatcgtgttgaaaggtgcagacaaacagttgatcggtcaagttgcagcagatattcgtgcttatcgccgtcctgaaccttataaaggtaaaggggtacgttacgctgatgaagtggtacgtatcaaagaggctaagaagaaataa

SEQ ID NO: 472 - DNA, 354 bp, HAEMOPHILUS INFLUENZAE
atggataagaaatcagctcgtatccgtcgtgcagctcgtgcacgtcatatgatgagagagcaaggtgtaactcgtttagttattcaccgcactccacgtcatatttatgcacaagttattgcaccaaacggttcagaagtgcttgccgctgcttcaactgttgagaaagcaattcgtgagcaagtaaaatacaccggtaataaagatgctgctgcagcagtaggtaaagctgttgcagaacgcgcattagcaaaaggcgttcaagctgttgcttttgatcgttccggttttaaatatcatggacgtgtccaaactttagcggacgctgcacgtgaagctggtctacagttctaa

SEQ ID NO: 473 - DNA, 501 bp, HAEMOPHILUS INFLUENZAE
atgtcaaacatcgaaaaacaagttggtgaactgcaagagaagctaatcgcagtaaaccgtgtatcaaaaactgtaaaaggtggtcgtattatgagtttcactgcattaacagtggtgggcgatggtaatggccgagtaggttttggttatggtaaagctcgcgaagttccagcagcgatccaaaaagcgatggaaaaagcacgtcgcaatatgattaatgtcgctttaaatgaaggtacattacaacatccagttaaaggtgttcatactggttcacgtgtatttatgcagccagcaagtgaaggtacaggtatcatcgctggtggtgcaatgcgtgcggtattggaagttgcaggtgtacgtaacgttctttctaaagcgtatggttctaccaacccaattaacgttgttcgtgcaactattgatgcattagcaaatatgaaatcaccagaaatggttgctgcaaaacgcggtaaaactgttgatgaaatcttggggtaa

SEQ ID NO: 474 - DNA, 180 bp, HAEMOPHILUS INFLUENZAE
atggctaaaactattaaagtaacacaagttcgtagctcaattgctcgtttaccgaagcataaagctaccttgcgtggtcttggtcttcgccatatacaccacactgttgagttaattgatacgcctgcagtacgtggtatgattaaccaagtttcatacatggttaaagtggaggagtaa

SEQ ID NO: 475 - DNA, 435 bp, HAEMOPHILUS INFLUENZAE
atgcgtttaaatactctatctccggctgaaggtgcaaagcatagtgctaaacgcctcggtcgtggtattggttcaggtttaggcaagactggtggccgcggtcataaaggtcaaaaatctcgtactggtggcggtgttcgtcgcggtttcgaaggtggtcaaatgccgttataccgtcgtttaccaaaatttggttttacttcaatgaaatctgcagtgactgcagaagttcgtttaaatgaattaaccaaagttgaaggtaatgtagtaactttagaaacattaaaagcagcaaatatcttaactaaagatatccaattcgctaaagtaattttagctggagaagtgaaatctgcagtaacggtacgcggtttacgtgtaactaaaggtgcaaaagcagcaattgaagctgctggcggttcaattgaggaataa

SEQ ID NO: 476 - DNA, 114 bp, HAEMOPHILUS INFLUENZAE
atgaaagttcgtgcttccgtaaagaaaatgtgtcgtaactgtaagattgttaaacgtgagggtgttgtacgcgtattgtgtagcgaccctaaacacaaacaacgtcaaggttaa

SEQ ID NO: 477 - DNA, 369 bp, HAEMOPHILUS INFLUENZAE
gtggcccgtattgcaggcattaacattcctgatcataaacacgctgtaatcgctttaactgccatttacggtattggtaaaactcgttcacaagctatttgtgcagcagcgggtattgctgaagatgttaagatcagagaattgtctgaagagcagattgacaaactgcgtgacgaagttggtaaatttaccgttgaaggtgacttacgtcgtgaagtaacactaaacatcaaacgtcttttagacttaggatgctatcgtggtttacgtcatcgtcgtagtttaccagtacgtggtcaacgtactaaaactaatgcgcgtacccgtaaggtccacgtaagccgatcaaaaaatagtcggggtaaataa

SEQ ID NO: 478 - DNA, 390 bp, HAEMOPHILUS INFLUENZAE
atggctaaaacaccagttcgtgcacgtaaacgtgtaaaaaaacaagttgtagatggcgtacgacatattcacgcatctttcaataatacaatcgttactattactgaccgtcaaggtaatgctctagcttgggcaactgcaggtggttcaggtttccgtggttctcgtaaatcaactccgttcgcagcgcaagttgcggcagagcgttgtgctgaaatcgttaaagaatttggcttaaagaacttggaagttatggttaaaggtccgggtccaggtcgtgaatctacaattcgtgcgttaaacgcagcgggtttccgtatcacgaatattactgatgtgactccgattcctcataacggttgtcgtccaccgaaaaaacgtcgtgtttaa

SEQ ID NO: 479 - DNA, 621 bp, HAEMOPHILUS INFLUENZAE
atggcaagatatttgggtcctaaactcaagctcagccgtcgtgaaggcactgatttattccttaaatcaggcgtgcgtgcgattgattcaaaatgtaaaattgatacagcaccaggtcagcacggtgctcgtaaaccgcgtttgtctgactatggtagtcagttacgtgaaaaacaaaaagttcgtcgtatctatggtattttagaacgtcaattccgtaactactataaagaagcaaaccgtttgaaaggtaacactggtgaaaatttattagtgttattagaaggtagattggataacgttgtttatcgcatgggatttgctacaactcgcgcagaggctcgtcaattagtgagtcataaagcaattgttgtgaatggtcgtgttgttaatattccatctttccaagtttctgtaaatgatgtagttgctattcgtgaaaaatcgaaaaaacaagctcgtattaaagcatcattagaattagcagagcaaagagaaaaaccaacatggttagaagttgattctgcaaaaatggaaggtgtattcaaacgtgttcctgaacgttctgatttatcagcagacattaacgaacatctgatcgttgagctttactctaaataa

SEQ ID NO: 480 - DNA, 387 bp, HAEMOPHILUS INFLUENZAE
atgcgccatcgtaagagtggtcgtcaactaaaccgtaatagtagtcatcgtcaagcgatgttccgtaacttagcaagtgctttagttagtcatgaaatcattaagactactttgcctaaagctaaagaattacgccgtgtagttgaaccgttaattacattagcaaaagtagatagcgttgctaaccgtcgtttagcattcgctcgtactcgcaacgttgaaactgttgcaaaattatttaatgaattaggtccacgttttgctcaacgtgcaggtggttacactcgcattttgaaatgtggttttcgtgcaggcgataatgcaccaatggcatacattgagttagttgatcgtccagaagttgctgaggcaacaactgaggaataa

SEQ ID NO: 481 - DNA, 312 bp, HAEMOPHILUS INFLUENZAE
atgtacgcagttttccaaagtggcggtaaacaacaccgtgtgagcgaaggtcaagttgttcgtttagaaaaacttgaacttgcaactggcgcaacagttgagttcgattctmtgttgatggtcgttaatggtgaagatgttaaaattggtgcgccagtagttgctggtgcaaaagtagtggctgaagttgttgcacaaggtcgtggcgagaaagttaaaatcgttaaattccgtcgtcgcaaacacagccgtaaacaacaaggtcatcgtcagtggttcacagaagtgaaaatcactgggattcaagcataa

SEQ ID NO: 482 - DNA, 756 bp, HAEMOPHILUS INFLUENZAE
gtggaggctcaaccccaacaaaaggaaaatattatggcacaagtttcaatgcgcgatatgatcaacgcaggcgtacacttcggacaccaaactcgttactggaacccacaaatgaaacctttcatttttggtgctcgtaacggtgttcacatcatcaatcttgaaaaaactttacctttattcaacgaagctttagcggaattaactcgcattgctagcaacaacggtaaagtattattcgttggtacaaaacgtgcagcgtctgaagcagttcaagcagcagcattagattgtcagcaatattacgtaaaccaccgttggttaggtggtatgttgactaactggaaaaccgttcgtcaatcaattaaacgtttaaaagatttagaaacccaatctcaagacggtacttttgataaattaaccaaaaaagaagcgttaatgcgtagccgtgagatggaaaaacttgaattaagccttggcggtatcaaagatatgggcggcttaccagatgcgttattcgttatcggtgcggaccacgaacatatcgcagttaaagaagcaaacaacctaggtattcctgtatttgctatcgttgatactaactcaacaccagctggcgtagatttcgttatccctggtaacgatgatgcgactcgtgctatccaactttacgtttctgcagctgcagcagcggttaaagaaggtcgtggtaacgaagctcaagttgctgaagaattagcagctgacgcagaataa

SEQ ID NO: 483 - DNA, 237 bp, HAEMOPHILUS INFLUENZAE
atgtctagagtttgtcaagtaacaggcaagcgtccagctgtgggtaataaccgctcacacgcaatgaatgcgacacgtcgtcgttttcttccaaaccttcacactcaccgtttttgggttgaaagtgaaaaccgtttcgtaaccttacgtttaactgcgaaaggtatgcgtattattgataaaaaaggcattgatgcagtattagctgaaatccgtgctcgtggcgaaaaaatctaa

SEQ ID NO: 484 - DNA, 270 bp, HAEMOPHILUS INFLUENZAE
ttgaccttggctaatatcaagtcagcaaaaaaacgcgcggttcaatctgaaaaacgtcgccaacacaacgcaagccaacgctctatgatgcgtacttatatcaaaaaagtatatgctcaagtagcagcaggcgaaaaatcagcagctgaagcagcattcgttgaaatgcaaaaagttgtagaccgtatggcttctaaaggcttaatccacgctaacaaagcagcaaaccacaaatctaaattagctgcacaaatcaaaaaattagcgtaa

SEQ ID NO: 485 - DNA, 132 bp, HAEMOPHILUS INFLUENZAE
atgaaacgtacatttcaaccttctgtattaaaacgtagtcgtactcacggtttccgtgctcgtatggcaactaaaaatggccgtcaagttttagcgcgtcgccgtgctaaaggtcgtaaaagtttatctgca

SEQ ID NO: 486 - DNA, 1650 bp, HAEMOPHILUS INFLUENZAE
  misc_feature (338)..(338): a or g or t or c
  misc_feature (576)..(576): a or g or t or c
atgtcagaatcttttgctcaactttttgaagaatcattaaaagtccttgaaactcgtcaaggttcaatcgttagcggtactgtagtagctatccaaaaaggctttgtgcttgttgatgcaggtttaaaatctgagtctgcaattccagttgctgaattcttaaatgcacaaggcgaacttgaaatccaagttggcgatactgtaaatgttgcattagatgcagttgaagatggtttcggtgaaactaaactttctcgtgagaaagcggttcgtcacgaatcttggattgaattagaaaaagcttacgaagaaaaagcgaccgttatcggtttaatcancggcaaagtgaaaggtggcttcacagttgagttaaacggtgttcgtgcattcttaccaggttctttagttgatactcgtccagcgcgtgaagcagatcacttacttggtaaagaattagaattcaaagtaatcaaattagatcaaaaacgtaacaacgttgttgtttctcgtcgtgcagtaattgaatctgaaaacagccaagaacgtgaacaagtattagaaaatcttgtggaaggntcagaagttaaaggtgtcgttaaaaacttaactgagtacggtgcattcgttgatcttggtggtgttgatggtttattacacatcacagatatggcttggaaacgtgttaaacacccaagtgaaatcgtaaatgttggcgatgaagttactgttaaagtattaaaattcgataaagatcgtactcgtgtatctttaggcttaaaacaattaggtcaagatccatgggcagcaattgctgaaaatcatccagtaaacagcaaattaacaggtaaagtaactaacttaactgactatggctgtttcgttgaaatcttagatggcgttgaaggtttagttcacgtttctgaaatggattggactaataaaaatatccacccatctaaagtggttagcttaggcgatactgtagaagtaatggtattagaaattgatgaagaacgtcgtcgtatttctttaggcttaaaacaatgtaaagctaacccttggactcagtttgctgatactcacaacaaaggcgataaagtaacgggtaaaatcaagtctatcactgatttcggtatcttcatcggtcttgaaggtggtatcgatggtttagttcacttatctgatatttcttggagtatttcaggcgaagaagctgttcgtcaatacaaaaaaggtgacgaagtttcagctgttgtattagctgttgatgcagtaaaagaacgtatctctttaggtattaaacaacttgaagaagatccattcaataactttgtcgcaatcaacaaaaaaggtgcggtagtatctgcaactgttgttgaagcagatgctaaaggtgctaaagttgaattagcaggtggtgttgaaggttatatccgttctgctgatttaacaagtgaagtagctgttggtgatgtcgttgaagcgaaatacactggagtagatcgtaaatctcgcattgttcacttatcagtgaaagcaaaagatcaagctgaagaagctgcggcagttgcaagtgtaaataacaaacaagaagatattgttattccaaatgcaatggctgaagcatttaaagcagctaaaggtgaataa

SEQ ID NO: 487 - DNA, 270 bp, HAEMOPHILUS INFLUENZAE
gtgcttccaagtaactttataagttcgcctgattatgttgttttaaacgaaaaatgcggagttattttaacaatgcctaaaatcaaaacagtacgcggcgcagcgaagcgcttcaaaaaaactgcttctggtggtttcaagcgtaaacaatctcacttacgtcatattttgactaaaaaaacaactaaacgtaaacgtcatttacgtcataaatcaatggttgcgaaagcagaccaagttttagtagtagcttgcttaccatacgcataa

SEQ ID NO: 488 - DNA, 354 bp, HAEMOPHILUS INFLUENZAE
atggctcgtgtaaaacgtggtgttattgcaagagcacgccataagaaagttcttaaggctgctaaaggttattatggtgcacgttcacgcgtgtatcgcgttgctttccaagcggtgatcaaagctggtcaatacgcataccgtgaccgtcgtcagcgtaaacgtcaattccgtcaattatggattgcacgtatcaacgctgcagcgcgtcaaaatggtttatcttatagcaaatttatcaacggcttgaaaaaagcatctgttgaaatcgaccgtaagattcttgctgatatcgctgtattcgacaaagtagcgttcgctgcattagttgaaaaagcaaaatctgcactttaa

SEQ ID NO: 489 - DNA, 270 bp, HAEMOPHILUS INFLUENZAE
atgtctctaagtactgaaaaaaaagcagcaatcgttgctgaatttggtcgtgatgcgaaagataccggttcttctgaagttcaaatcgcattattaactgcacaaatcaaccacttacaaactcactttgcagagcacaaaaaagaccaccatggtcgtcgtggtttattacgtatggtttctcgtcgtcgtaaacttttagactacttaaaacgtactgatcttgctttataccaaagcactatcgctcgtttaggtttacgtcgctaa

SEQ ID NO: 490 - DNA, 393 bp, HAEMOPHILUS INFLUENZAE
atggcagagaatcaaaactacggcacaggccgccgcaaaagctcttcagctcgtgtatttatcaaaccgggcagtggtaaaatcactatcaaccaacgtgaattagatgtttactttggtcgcgaaacagcacgtatggtagtacgtcagccattagagttggttgawttaactgataagttagatttatacatcacagttaaaggtggtggtatttctggtcaagcgggtgcaatccgtcacggtatcactcgtgcattaatggaatacgatgaaacattacgcccagcacttcgtgcagctggtttcgttactcgtgacgcacgtcgcgttgaacgtaaaaaagtgggtttacacaaagcacgtcgtcgtccacaatactcaaaacgttaa

SEQ ID NO: 491 - DNA, 429 bp, HAEMOPHILUS INFLUENZAE
atgaaaacttttgtagcaaaaccagaaacggttaaacgcgactggtacgtagtagatgcgacaggtaaaactttaggtcgtttagcgactgaattagcacgtcgtcttcgtggtaaacacaaggctgagtacactccacacgtagatactggtgattacatcatcgttatcaacgcagacaaagtggcagtaactggtcgtaaagaaacagataaactttactactggcacactggctatgtaggtggtattaaacaagcgactttcaaagaaatgatcgctcgccgtcctgaagcagtgattgaaattgcggttaaaggtatgttgccaaaaggtccattaggccgtgcaatgttccgtaaattaaaagtgtatgcaggtggagaacaccaacacgcagcacaacaaccacaagtattagatatttaa

SEQ ID NO: 492 - DNA, 288 bp, HAEMOPHILUS INFLUENZAE
atggcatttaaatttaacgctgaagttcgtacagcgcaaggtaagggtgcgagccgccgcctgcgtcacaatggtcaaattcctgcaatcgtttatggtggtagcgaagagccagtttcaatcatcttaaaccacgatgaattaaacaacgcacaagcacacgaatctttctattctgaagtgatcactttagtagtagagggtaaagaagttgcagttaaagtacaagctatgcaacgccatccattcaaaccaaaattggttcacattgacttcaaacgcgcataa

SEQ ID NO: 493 - DNA, 1290 bp, HAEMOPHILUS INFLUENZAE
atggatttactttcagacattgaaaaacaactccaaaaagccaccgctcaagcatttcttattgccttgagtggtggtttagattccactgtacttctttctttatttgcaaaactttgtcaaaaacaaccgcacttaccgcctttatcaatacgagcaatccatattcatcacggattaagccccaatgccgacagttgggctaaacattgtcaagacttatgcgatcaatttcaaattccattgattattgagcgagtacaagtagataaaactaatggtattgaggctggcgcacgtgaagcacgctatcaagccatcaaaaaatatcttcaaacacaagaaatgctggtcacagcgcatcatctaaacgatcaaactgaaacctttttcttagccctaaaacgtggcagtgggctaaaaggcttaggcgcaatgcaacaacaaagtgtattattcggcatgccaattttacgccctttgttaggctttactcgcacccagttagaaaattacgcgcaaaaagaaaaactcaactggattacagacgaaagtaatgaagataatcgatacgatcgtaatttcttacgcaatgaaattttgccagaattacgtgaacgctgggctcattttgatttagccgtgcaacgttcagcacaacattgttttgagcaacaacagctaattaatgatttattgagcgaaatttttacagaacattgtcaaattaaaaaccaatttaaactgtgccagttccgccaatattctctcgcaaaacagaccgcacttttgcgtatgtggcttgccgaaaaccagcttgaaatgccaagtaaacgccagcttacacagcttattaatgatgtcatttttgcaaaagaagaggcaaatcctcaatttcagcttgtaaataaagttattcgacgttatcaagatagtttatatttaactaagccgttttctgatctaaccaaatgcaccctaaaattagaacaaaatacgctaaatttacccgatgatttaggcaatctcacagttcaagaaaatgaacataatctgattttctactggcaggattactctgttacgctggaaaaaacgaacttgcctatttctattcgttttggctattcgggcaaagtgaaacattatccgaaacgcccaagagaagatataaaaaaaatctggcaagaattaggcgtgccaccttgggaacgaaatcgaatccccttaattttttatggcaacgagctaaaaagtgcggtcggtttttttcgtgttttaaaatcaagt

SEQ ID NO: 494 - DNA, 3477 bp, HAEMOPHILUS INFLUENZAE
atgtcatcccaacctcgcttcatccatcttcgcacacacacagatttttcgatgattgacagtatcgtcaaagtgaaacctcttgtgaaagcttgtgctgccaatgaaatggttgctatgggattaacggattttactaatttttgtggtgtggttagtttttatagcgaaatgctttcttcgggtatgaagcccattatcggggcagatgtaaaagtaaaaagcccattatgtggcgatgaatactttgatcttactttgctagctaaaaataatgaaggctatagaaatattactttattgttatcaaaggcttatcaacgcggttataacgatttaccttatattgatcaagattggttaattgaacatcgcgacggcgtgattattttatcagggggaacgcaaggcgatgtgggtaaaaaattgttgaaagaaaacgtagccgaaattgaaagtgcggtcgctttttaccaagaattttttgccgatcatttttatttagcattaagtcgtacaggtcgcccaaatgaagaacgttacattcaagcagcgttgaaattagcagaacgttgtgatttaccattggtcgcaactaatgatgtgatgtttttgaatacagaggattttgaagcccacgaaattcgcgtagcgattcacgatggctatactttagacgatcctaaacgtccgaaatgttatacctcacagcaatattttcgtagtgaagaagatatgtgtaagctgtttgcagacattccttccgctctcgaaaataccttattaattgcgcaacgttgtagtgtgactttgcgccttggtcaatatttcttacctcaatttccaactggcgatttaagtacagaagatttcttagtgcaaaaatccaaagagggcttggaagaacgtttagtttttttattccctgatgaaaaagtgcggttagaaaaacgaccaaaatatgatgaacgcttgcaagttgagctagatgtaattaaccaaatggggttcccaggttatttcttgatcgtaatggaatttattcaatggtctaaggataacgatattccagtagggccaggtcgtggttctggtgcgggttcattagtggcttatgcattaaaaatcactgatttagatccgttagagtttgatttgctatttgaacgtttcttaaatccagaacgtgtgtctatgcccgatttcgacgtggatttctgtatggacggtcgcgatcgcgtgattgagcacgttgcagaaacctatggtcgtggcgcggtatcacaaattattacctttggtacaatggcggcgaaagcggttattcgagatgtagggcgagtgctggggcatccttatggtttcgttgatcgtatttctaaattgattccgccagatccaggtatgacgcttgccaaagcgtttgagaccgagccgcaattacagactgcctacgatagcgatgaagaagtgcgagcattgattaacatggcgcgcaagctggaaggtgtgacacgtaatgcaggtaaacatgcaggtggcgtggtcatttcgccaaccttaattactgattttgcaccactctattgtgataatgaaggcttacatccagttactcactttgataaaaatgatgtggaatatgcagggcttgtgaaatttgacttcctaggcttgcgtactcttactatcattaaatgggcattggatataattaatgttcgtatggtgcgtgaaggcaagcctcgagtagatattgccgccattccacttgatgatcctgaatcttttgaattacttaaacgttccgaaaccaccgccgtgttccagttggaatcacgaggtatgaaagatttgatcaaacgcctgcaacctgactgttttgaagatattatcgcattggtagcattgttccgtccggggccgttacaatcgggtatggtagataactttatcgaccgtaaacacgggagagaagaagtatcttaccctgacgcagaatatcaacatgcaagtttgaaacctattcttgagccgacttacggcattattttgtatcaagaacaagtgatgcaaattgcgcaggtgttggctggctatacgctgggtggggctgacttattgcgtcgagcaatgggtaaaaagaaaccagaagaaatggcaaaacagcgtttagtgtttaaagagggggctgagaaaaacggtattgatggcgagctatctatgaagattttcgacttggtggaaaaatttgctggctatggttttaataaatctcactctgctgcttatgccttggtgtcttaccaaactctttggcttaaaactcatttccctgcagaatttatggctgcagtgatgacatcagaaatggataatacggataaaatcgtaggtttatacgacgaatgtttgcgtatgggcttaaaagtgacgccaccagatattaatatcggaaaacaccattttagtgtcaatgaacaaggcgaaattgtgtatgggattggcgcgattaaaggcgtgggggaaggcccgattgaagcacttgtggcggcaagaaatgaaggggggattttcaaagatttattcgatttatgcgctcgtgtagatttgaaaaaaattaaccgccgtacttttgaaagcctaattatgtcgggtgcctttgataaattaggcccacatcgcgccgcactttctaagaatttggaagatgcacttagagcttccgatcagcatgcgaaagatgaagcaatgggacaaacggatatgttcggtgtgctgactgaaacccatgaagacgtggaaaatgcctatgctaatacaccgccttataccgaaaaacaaatccttgatggcgaacgagaaaccttggggctttatttaagtagccatcctgttagccgttatttgaaagaactttcccattacacatcgacgcggttgaaagatctcgcaccaaatcgccgtggacaaattagcactgtggcggggctcgttgtggcatcgagaattgcgatgacgaaaaaaggcaatcgtctaggtattgcaacattggatgaccgttcaggtcgcttagatttaacattatttggtgaaagcctagaacaatttggtgagaaattacaaaaagatacagtgattgttgcttcagggcaggtgagctttgatgatttctctggtggcttgaaaatgacggtgcgcgagttaatgaccttagatgaggctcgttctcgttatgtcaaatccttggctattagtctttctgagcatcaaattacaccaagtttcattaaacaatttaaagcattacttgagccagtgagtggtggaacattgcctattaacgtgtattatcaaagtccgaaaggtcgtgcgttgttacgtttaggcgtgcaatggtcgatcattccaacagatgaaattctgacggaattggtgaatttactcggcgaaagtgcggtggaattagagtttgaa

SEQ ID NO: 495 - DNA, 867 bp, HAEMOPHILUS INFLUENZAE
atgcttaaacaacgagttttatctgctattgtgttaattgctgcagttttatgtgcgctatttttattcacacctttttattttgccctcgctttaggggcagtagcgattttaggcatttgggaatggactcaatttgctcgcctaaaacaacctttgatacgtttttttgtgactacctttttaggcgtatttatcttcttatggctctatactgagggcaactatttagatgcagggcgtgtgtttgaacaacatcttcagcttttattgataaatgctgttagctggtggggtttagctttgttacttgtgatcagttaccctaaatcagctaaattttggtctaaaaatccacttttacaacttttatttgccttttctacgttgattccatttgtcgcaggtgtattacgtttacgtttagaacactatacccatgatccttatcacggcttatttttattactttacgtatttatacttgtttgggcggctgattctggtgcttattttagcggacgcgcctttggcaaacgtaaacttgcccctaaagtatcgccaggtaaaagttgggaaggggtcattggtggcttaattacagcattagtgcttgcttttatctttattcatttctctaacaatactttagtaggcgatcgaaatattactggatttatcattctttctgtagccacagttgcaatttcagtattgggcgatttaactgaaagtatgtttaaacgtgagtcaggagttaaagacagcagtcaattaattccaggtcacggcggcgtattagatcgcattgacagcttgactgccgcggtaccttttttcagctatttctatttctttgtcttataa

SEQ ID NO: 496 - DNA, 633 bp, HAEMOPHILUS INFLUENZAE
atgggaaattatatgacttatattgttggcttaactggtggcattggtagtggtaaaacaacgattgctaatttatttaccgatcttggcgtacctctagtggatgcggatgtggttgctagagaagtcgtcgcgaaagattcccccttattgtcaaaaattgttgaacattttggggctcaaattttaacggaacaaggcgagcttaatcgcgcggctttacgagagcgagtgtttaaccatgatgaagataaattgtggttaaataaccttctacatcccgctattcgtgaacgaatgaaacaaaaattagctgaacaaactgcgccttacacattatttgtcgtccctttattaatagaaaataaattgaccgcactttgtgatcgtattttggtggtggatgtgagtccacaaactcaacttgctcgttcagctcaacgagataacaataattttgaacaaattcaacgaattatgaattctcaagtttctcaacaagagcgtttgaaatgggcggatgatgtgattaataatgatgctgaactggcccaaaacttaccgcacttgcagcaaaaggtgctagaattgcaccagttttatttacaacaagcggaaaataaaaatgcctga

SEQ ID NO: 497 - DNA, 1533 bp, HAEMOPHILUS INFLUENZAE
atgggcaattccgcaaaaaaattcccgcctattcaaggtggtgcgctgattttattaacgctggctttatctcttgccacctttatgcaggtattagattctaccattgcaaatgtggcaattcctactattgcgggcgatcttggcgcatcttttagtcaaggcacgtgggtaattacttcttttggggtagcaaatgcgatttctattccaataacgggttggttagcaaaacgttttggcgaagtgcggttatttttagtctcaacttttttatttgttgtctcttcttggctctgtgggattgcagatagtcttgaggcgttaattatttttcgcgtcattcaaggtgctgtcgcaggcccagtgatccctctttcgcaaagtttattattaaataattatccaccagaaaaacgcggaatggcattggcattttggtcaatgactattgtggttgcgcctatttttggcccaattttaggcggatggattagcgataatatccattggggatggatcttttttatcaatgttccgatcggtttgtcagttgtgctaatcagctggaagattttgggaagcagagaaagtgaaattgttcatcaacctattgataaagtcggtttagttttacttgtcttaggcgtgggatgtttgcaattaatgcttgatcagggtcgtgagcaagattggtttaattctaatgaaatcattatattagccgttgttgctgtcgtttgtctgattgccttggttatttgggaattgacagatgacaatcctgtagtggatatttcgcttttccattctcgtaattttagcgtagggtgtttatgtactagtttagcctttttgatttatctaggttctgtggtattaattccgctcttgctacaacaagtcttccattacactgcgacgtgggcagggcttgcagcttccccagttggattattcccaattttgctttcaccgattattgggcgtttcggttataagatcgatatgcgaattttagtgacgataagctttattgtatatgcaataacattttattggcgagcggtaactttcgagccatcaatgacatttgttgatgtagctttaccacaattagtgcaaggtttagcggtgtcctgtttctttatgccacttactacaataacgctgtctggcttgcctgcgcataaaatggcttcagcctctagcttatttaactttttgagaactttagcgggttctgtaggaacatctttgaccacatttatgtggtataaccgtgaagctgttcaccacactcaattaacagaacacattaatccttataacccaatttcccaaagtttttaccatcaaatgaatcaatttggtttaagtgatacgcaaacttcagcttacctcgctcaacaaataacatcgcaaggatttattattggcgcaaatgaaatattttggttatccgctatgggattcttaggattgcttattgtgatttggtttgcaaaaccaccttttggtactcagcattaa

SEQ ID NO: 498 - DNA, 714 bp, HAEMOPHILUS INFLUENZAE
atgagccaaccaatttataaacgtattttattgaaattaagcggtgaagcattacaaggagaagatggtcttggtatcgatcctgcgattctcgatcgtatggctgttgaaattaaagaattagtggagatgggtgtggaagtcagtgtcgttctcggtggtggcaacttattccgtggcgcaaaactagcaaaagcggggatgaatcgcgtggtgggcgatcatatgggaatgcttgctactgtgatgaatggtttggcaatgcgtgattctttattccgtgctgatgtgaacgcaaaattaatgtccgctttccaattaaatggtatttgcgatacttataactggtctgaagctatcaaaatgttacgcgaaaaacgcgtagtcattttctctgcgggaacgggaaatccattctttaccactgattctaccgcttgtttgcgtggtattgaaattgaagctgatgttgtgttgaaagcgactaaagttgatggtgtgtatgattgtgatcctgcgaaaaatcctgatgcaaaactttataaaaatttaagttatgcagaagtgatcgataaagaattaaaagtgatggacttatcggcgtttactttagctcgcgatcatggcatgccgattagagtgttcaatatgggtaaacctggagcattacgtcaagtagtgactggtactgaagaaggcaccactatttgttag

SEQ ID NO: 499 - DNA, 861 bp, ARTIFICIAL
  Sequence of the CM coding sequence and flanking regions
ccctgttgataccgggaagccctgggccaacttttggcgaaaatgagacgttgatcggcacgtaagaggttccaactttcaccataatgaaataagatcactaccgggcgtattttttgagttatcgagattttcaggagctaaggaagctaaaatggagaaaaaaatcactggatataccaccgttgatatatcccaatggcatcgtaaagaacattttgaggcatttcagtcagttgctcaatgtacctataaccagaccgttcagctggatattacggcctttttaaagaccgtaaagaaaaataagcacaagttttatccggcctttattcacattcttgcccgcctgatgaatgctcatccggaattccgtatggcaatgaaagacggtgagctggtgatatgggatagtgttcacccttgttacaccgttttccatgagcaaactgaaacgttttcatcgctctggagtgaataccacgacgatttccggcagtttctacacatatattcgcaagatgtggcgtgttacggtgaaaacctggcctatttccctaaagggtttattgagaatatgtttttcgtctcagccaatccctgggtgagtttcaccagttttgatttaaacgtggccaatatggacaacttcttcgcccccgttttcaccatgggcaaatattatacgcaaggcgacaaggtgctgatgccgctggcgattcaggttcatcatgccgtctgtgatggcttccatgtcggcagaatgcttaatgaattacaacagtactgcgatgagtggcagggcggggcgtaatttttttaaggcagttattggtgcccttaaacgcctggtgctacgcc

SEQ ID NO: 500 - DNA, 20 bp, ARTIFICIAL
  Primer
tctgcttttgctccccgctc

SEQ ID NO: 501 - DNA, 20 bp, ARTIFICIAL
  Primer
acgaattgctgcgaccaatg

SEQ ID NO: 502 - DNA, 20 bp, ARTIFICIAL
  Primer
agaggaaggttatggtaacc

SEQ ID NO: 503 - DNA, 20 bp, ARTIFICIAL
  Primer
caagctcgcaacacgatcag

SEQ ID NO: 504 - DNA, 21 bp, ARTIFICIAL
  Primer
ggcgcaagccgagcataacag

SEQ ID NO: 505 - DNA, 19 bp, ARTIFICIAL
  Primer
tggaatacacgctcaacgc

SEQ ID NO: 506 - DNA, 20 bp, ARTIFICIAL
  Primer
atccgtgtaggttcttgtgg

SEQ ID NO: 507 - DNA, 20 bp, ARTIFICIAL
  Primer
agaatacacctggactacgg

SEQ ID NO: 508 - DNA, 20 bp, ARTIFICIAL
  Primer
tgcaagttgcagctggtatg

SEQ ID NO: 509 - DNA, 20 bp, ARTIFICIAL
  Primer
gcatcaggagaagcgataac

SEQ ID NO: 510 - DNA, 20 bp, ARTIFICIAL
  Primer
gtatccaccaccgcatcttg

SEQ ID NO: 511 - DNA, 20 bp, ARTIFICIAL
  Primer
actgtgcgaccacgtttatc

SEQ ID NO: 512 - DNA, 21 bp, ARTIFICIAL
  Primer
cgtgaaaacgaatcatttgac

SEQ ID NO: 513 - DNA, 20 bp, ARTIFICIAL
  Primer
acggtttgtcttaactcgag

SEQ ID NO: 514 - DNA, 21 bp, ARTIFICIAL
  Primer
aggtctcggtcaagctctacc

SEQ ID NO: 515 - DNA, 20 bp, ARTIFICIAL
  Primer
tggtatcggcgatgaagcac

SEQ ID NO: 516 - DNA, 20 bp, ARTIFICIAL
  Primer
atcgtgtttatggttcatcc

SEQ ID NO: 517 - DNA, 20 bp, ARTIFICIAL
  Primer
tcgtcgatgacttgttgagg

SEQ ID NO: 518 - DNA, 20 bp, ARTIFICIAL
  Primer
ccgtcgtcgtaagttctgcc

SEQ ID NO: 519 - DNA, 20 bp, ARTIFICIAL
  Primer
acctgctttagatgcgatag

SEQ ID NO: 520 - DNA, 20 bp, ARTIFICIAL
  Primer
gaagaagcagcggcacaagg

SEQ ID NO: 521 - DNA, 20 bp, ARTIFICIAL
  Primer
cttctgacgcttcagctgcc

SEQ ID NO: 522 - DNA, 20 bp, ARTIFICIAL
  Primer
aaccagctagtacgcaaacc

SEQ ID NO: 523 - DNA, 20 bp, ARTIFICIAL
  Primer
tgctcttgaaggttatgacc

SEQ ID NO: 524 - DNA, 20 bp, ARTIFICIAL
  Primer
tgttgaagcacgcaagattc

SEQ ID NO: 525 - DNA, 20 bp, ARTIFICIAL
  Primer
acctcaacagttggacgtac

SEQ ID NO: 526 - DNA, 20 bp, ARTIFICIAL
  Primer
gccgcacgattacatcactg

SEQ ID NO: 527 - DNA, 20 bp, ARTIFICIAL
  Primer
gctctaatgttccacgtagg

SEQ ID NO: 528 - DNA, 21 bp, ARTIFICIAL
  Primer
gctgaagtaaatgaagcagcc

SEQ ID NO: 529 - DNA, 20 bp, ARTIFICIAL
  Primer
tcgttagagaacgcgataag

SEQ ID NO: 530 - DNA, 21 bp, ARTIFICIAL
  Primer
aacgaacaaatcattgaagcg

SEQ ID NO: 531 - DNA, 21 bp, ARTIFICIAL
  Primer
ctactttgttcgcacctgcag

SEQ ID NO: 532 - DNA, 20 bp, ARTIFICIAL
  Primer
ccgtgttgttatatcccgag

SEQ ID NO: 533 - DNA, 20 bp, ARTIFICIAL
  Primer
agccaaagatacagatcgag

SEQ ID NO: 534 - DNA, 20 bp, ARTIFICIAL
  Primer
ggagctctggtctaatgcag

SEQ ID NO: 535 - DNA, 21 bp, ARTIFICIAL
  Primer
gttccaacgtttaacaccacc

SEQ ID NO: 536 - DNA, 20 bp, ARTIFICIAL
  Primer
gcaaacgcactcactgtttc

SEQ ID NO: 537 - DNA, 20 bp, ARTIFICIAL
  Primer
gtgagtttatgccagcttgg

SEQ ID NO: 538 - DNA, 20 bp, ARTIFICIAL
  Primer
tctcaagaagggtcctttcc

SEQ ID NO: 539 - DNA, 20 bp, ARTIFICIAL
  Primer
gatttgagcaggaacgccag

SEQ ID NO: 540 - DNA, 20 bp, ARTIFICIAL
  Primer
agttcacaaaggccgcaacc

SEQ ID NO: 541 - DNA, 20 bp, ARTIFICIAL
  Primer
cgaatctctacggtatcacc

SEQ ID NO: 542 - DNA, 20 bp, ARTIFICIAL
  Primer
aggagattggcatcacagag

SEQ ID NO: 543 - DNA, 20 bp, ARTIFICIAL
  Primer
gacgaccttgctgacgcttc

SEQ ID NO: 544 - DNA, 20 bp, ARTIFICIAL
  Primer
gactatgctggatgttgctg

SEQ ID NO: 545 - DNA, 21 bp, ARTIFICIAL
  Primer
gaactcccacatacgctcacc

SEQ ID NO: 546 - DNA, 20 bp, ARTIFICIAL
  Primer
atcaatgaaagcacgcgatg

SEQ ID NO: 547 - DNA, 21 bp, ARTIFICIAL
  Primer
ccttcagtaacaccgataacc

SEQ ID NO: 548 - DNA, 20 bp, ARTIFICIAL
  Primer
tatccgtcgtgcagctcgtg

SEQ ID NO: 549 - DNA, 20 bp, ARTIFICIAL
  Primer
acgaacttctgcagtcactg

SEQ ID NO: 550 - DNA, 20 bp, ARTIFICIAL
  Primer
gaagcgtcagcaaggtcgtc

SEQ ID NO: 551 - DNA, 20 bp, ARTIFICIAL
  Primer
tcacgacggctgacgttgag

SEQ ID NO: 552 - DNA, 20 bp, ARTIFICIAL
  Primer
caatgaaagttcgtgcttcc

SEQ ID NO: 553 - DNA, 21 bp, ARTIFICIAL
  Primer
gccattcttatttaccccgac

SEQ ID NO: 554 - DNA, 20 bp, ARTIFICIAL
  Primer
caatgaaagttcgtgcttcc

SEQ ID NO: 555 - DNA, 20 bp, ARTIFICIAL
  Primer
tcctctaccacgctgaacac

SEQ ID NO: 556 - DNA, 20 bp, ARTIFICIAL
  Primer
ggtcctaaactcaagctcag

SEQ ID NO: 557 - DNA, 20 bp, ARTIFICIAL
  Primer
agcctctgcgcgagttgtag

SEQ ID NO: 558 - DNA, 20 bp, ARTIFICIAL
  Primer
gtgttcagcgtggtagagga

SEQ ID NO: 559 - DNA, 20 bp, ARTIFICIAL
  Primer
agggctagttggtctgtatc

SEQ ID NO: 560 - DNA, 20 bp, ARTIFICIAL
  Primer
tcgtaagagtggtcgtcaac

SEQ ID NO: 561 - DNA, 20 bp, ARTIFICIAL
  Primer
gttgcgagtacgagcgaatg

SEQ ID NO: 562 - DNA, 20 bp, ARTIFICIAL
  Primer
gcctaccaacacactcgctg

SEQ ID NO: 563 - DNA, 20 bp, ARTIFICIAL
  Primer
ttccgcataagagccgtatc

SEQ ID NO: 564 - DNA, 20 bp, ARTIFICIAL
  Primer
tttccaaagtggcggtaaac

SEQ ID NO: 565 - DNA, 20 bp, ARTIFICIAL
  Primer
actttctcgccacgaccttg

SEQ ID NO: 566 - DNA, 20 bp, ARTIFICIAL
  Primer
gctttatcagaaactccgtg

SEQ ID NO: 567 - DNA, 20 bp, ARTIFICIAL
  Primer
gaattacgcattaccgccag

SEQ ID NO: 568 - DNA, 21 bp, ARTIFICIAL
  Primer
gtttcaatgcgcgatatgatc

SEQ ID NO: 569 - DNA, 20 bp, ARTIFICIAL
  Primer
agtaccgtcttgagattggg

SEQ ID NO: 570 - DNA, 21 bp, ARTIFICIAL
  Primer
ctggtatcaaaggttgtcctg

SEQ ID NO: 571 - DNA, 20 bp, ARTIFICIAL
  Primer
ctactgcagagacaggtcac

SEQ ID NO: 572 - DNA, 20 bp, ARTIFICIAL
  Primer
agtaacaggcaagcgtccag

SEQ ID NO: 573 - DNA, 20 bp, ARTIFICIAL
  Primer
gccatatccacacgaatacc

SEQ ID NO: 574 - DNA, 20 bp, ARTIFICIAL
  Primer
gatagcgagcgcaagatctg

SEQ ID NO: 575 - DNA, 20 bp, ARTIFICIAL
  Primer
tcgccttcgccagttaatac

SEQ ID NO: 576 - DNA, 20 bp, ARTIFICIAL
  Primer
aaaacgcgcggttcaatctg

SEQ ID NO: 577 - DNA, 20 bp, ARTIFICIAL
  Primer
gtggtttgctgctttgttag

SEQ ID NO: 578 - DNA, 20 bp, ARTIFICIAL
  Primer
gaggctactgtgcgtatagg

SEQ ID NO: 579 - DNA, 20 bp, ARTIFICIAL
  Primer
gcacgaccagaacgagtatc

SEQ ID NO: 580 - DNA, 20 bp, ARTIFICIAL
  Primer
ttatgactagaattgcgctc

SEQ ID NO: 581 - DNA, 22 bp, ARTIFICIAL
  Primer
ccttgaaaagttcagcttaacc

SEQ ID NO: 582 - DNA, 20 bp, ARTIFICIAL
  Primer
actgttgatggccctagtgg

SEQ ID NO: 583 - DNA, 20 bp, ARTIFICIAL
  Primer
cgaacttcaacacgatcacc

SEQ ID NO: 584 - DNA, 20 bp, ARTIFICIAL
  Primer
caaggttcaatcgttagcgg

SEQ ID NO: 585 - DNA, 20 bp, ARTIFICIAL
  Primer
ccatcaacaccaccaagatc

SEQ ID NO: 586 - DNA, 20 bp, ARTIFICIAL
  Primer
ctgcacgtatccatcacttg

SEQ ID NO: 587 - DNA, 20 bp, ARTIFICIAL
  Primer
cccctaaacgctttacttgg

SEQ ID NO: 588 - DNA, 20 bp, ARTIFICIAL
  Primer
aagttcgcctgattatgttg

SEQ ID NO: 589 - DNA, 20 bp, ARTIFICIAL
  Primer
cagcgttgatacgtgcaatc

SEQ ID NO: 590 - DNA, 20 bp, ARTIFICIAL
  Primer
cttgctgaacaaaatgcgcc

SEQ ID NO: 591 - DNA, 20 bp, ARTIFICIAL
  Primer
tgaactgtttgtcgcaggtg

SEQ ID NO: 592 - DNA, 20 bp, ARTIFICIAL
  Primer
gcaatcgttgctgaatttgg

SEQ ID NO: 593 - DNA, 20 bp, ARTIFICIAL
  Primer
aacctaaacgagcgatagtg

SEQ ID NO: 594 - DNA, 20 bp, ARTIFICIAL
  Primer
tcgtcaccgcgtaacgcaac

SEQ ID NO: 595 - DNA, 20 bp, ARTIFICIAL
  Primer
ccgtagcactggcagacaag

SEQ ID NO: 596 - DNA, 20 bp, ARTIFICIAL
  Primer
tgtagcaaaaccagaaacgg

SEQ ID NO: 597 - DNA, 20 bp, ARTIFICIAL
  Primer
cgcttgaccagaaataccac

SEQ ID NO: 598 - DNA, 20 bp, ARTIFICIAL
  Primer
cctagagattattcggaggg

SEQ ID NO: 599 - DNA, 21 bp, ARTIFICIAL
  Primer
cgagatcaactcgtcgtaatg

SEQ ID NO: 600 - DNA, 20 bp, ARTIFICIAL
  Primer
gaagttcgtacagcgcaagg

SEQ ID NO: 601 - DNA, 20 bp, ARTIFICIAL
  Primer
gaatggatggcgttgcatag

SEQ ID NO: 602 - DNA, 21 bp, ARTIFICIAL
  Primer
ctgctggtgaaacgatttgac

SEQ ID NO: 603 - DNA, 20 bp, ARTIFICIAL
  Primer
gatagctcgccatcaatacc

SEQ ID NO: 604 - DNA, 20 bp, ARTIFICIAL
  Primer
ccatcttcgcacacacacag

SEQ ID NO: 605 - DNA, 20 bp, ARTIFICIAL
  Primer
gcgacctgtacgacttaatg

SEQ ID NO: 606 - DNA, 20 bp, ARTIFICIAL
  Primer
gcagttgttaggcgtagatg

SEQ ID NO: 607 - DNA, 20 bp, ARTIFICIAL
  Primer
cagccgccatattccattac

SEQ ID NO: 608 - DNA, 20 bp, ARTIFICIAL
  Primer
agccaccgctcaagcatttc

SEQ ID NO: 609 - DNA, 20 bp, ARTIFICIAL
  Primer
gttgttgcattgcgcctaag

SEQ ID NO: 610 - DNA, 20 bp, ARTIFICIAL
  Primer
ggacacaccaatggcgttac

SEQ ID NO: 611 - DNA, 20 bp, ARTIFICIAL
  Primer
gattacgcactggagttagg

SEQ ID NO: 612 - DNA, 21 bp, ARTIFICIAL
  Primer
ctgctattgtgttaattgctg

SEQ ID NO: 613 - DNA, 20 bp, ARTIFICIAL
  Primer
cacctgcgacaaatggaatc

SEQ ID NO: 614 - DNA, 24 bp, ARTIFICIAL
  Primer
gcaattaagtaactactcactggg

SEQ ID NO: 615 - DNA, 20 bp, ARTIFICIAL
  Primer
tcttgatcccattaatcgcc

SEQ ID NO: 616 - DNA, 20 bp, ARTIFICIAL
  Primer
agcggtgaagcattacaagg

SEQ ID NO: 617 - DNA, 19 bp, ARTIFICIAL
  Primer
acaagcggtagaatcagtg

SEQ ID NO: 618 - DNA, 21 bp, ARTIFICIAL
  Primer
cactaccgcatgcacatgttg

SEQ ID NO: 619 - DNA, 41 bp, ARTIFICIAL
  Primer
ccatgggcagcagcaaaggaaagtttattgtcattgagggc

SEQ ID NO: 620 - DNA, 68 bp, ARTIFICIAL
  Primer
ggatcctcaatggtgatggtgatggtgagctgctttttcgtttgatttccaccaattttttaccgcac

SEQ ID NO: 621 - DNA, 25 bp, ARTIFICIAL
  Primer
acctacaacaaagctctcatcaacc

1. An isolated polynucleotide comprising a nucleotide sequence having at least about 95 percent structural similarity with a nucleotide sequence selected from the group consisting of the coding sequence in SEQ ID NO:31, 99, 109, 124, 180, 210, 215, 200, and the complements thereof.

2. (canceled)

3. An isolated polynucleotide comprising a coding sequence encoding a polypeptide having at least about 95 percent structural similarity with an amino acid sequence selected from the group consisting of SEQ ID NO: 286, 301, 314, 322, 323, 327, and 299.

4. (canceled)

5. An isolated polypeptide comprising an amino acid sequence having at least about 95 percent structural similarity with an amino acid sequence selected from the group consisting of SEQ ID NO: 286, 299, 301, 304, 314, 322, 323, 327.

6. (canceled)

7. A method for identifying an agent that binds a polypeptide, the method comprising:
combining a polypeptide and an agent to form a mixture, wherein the polypeptide is encoded by a coding sequence comprising a nucleotide sequence having at least about 95 percent structural similarity with a nucleotide sequence selected from the group consisting of SEQ ID NO:31, 99, 109, 124, 180, 210, 215, 232, and 200; and
determining whether the agent binds the polypeptide.

8. The method of claim 7 wherein determining comprises an assay selected from the group consisting of an enzyme assay, a binding assay, and a ligand binding assay.

9. The method of claim 7 further comprising determining whether the agent decreases the growth rate of a microbe, comprising:
combining a microbe with the agent;
incubating the microbe and the agent under conditions suitable for growth of a microbe that is not combined with the agent; and
determining the growth rate of the microbe combined with the agent, wherein a decrease in growth rate compared to the microbe that is not combined with the agent indicates the agent decreases the growth rate of the microbe.

10. The method of claim 9 wherein the microbe is H. influenzae.

11-12. (canceled)

13. A method for identifying an agent that binds a polypeptide, the method comprising:
combining a polypeptide and an agent to form a mixture, wherein the polypeptide has at least about 95 percent structural similarity with an amino acid sequence selected from the group consisting of SEQ ID NO: 286, 299, 301, 304, 314, 318, 322, 323, and 327;
determining whether the agent binds the polypeptide.

14. The method of claim 13 wherein determining comprises an assay selected from the group consisting of an enzyme assay, a binding assay, and a ligand binding assay.

15. The method of claim 13 further comprising determining whether the agent decreases the growth rate of a microbe, comprising:
combining a microbe with the agent;
incubating the microbe and the agent under conditions suitable for growth of a microbe that is not combined with the agent; and
determining the growth rate of the microbe combined with the agent, wherein a decrease in growth rate compared to the microbe that is not combined with the agent indicates the agent decreases the growth rate of the microbe.

16. The method of claim 15 wherein the microbe is H. influenzae.

17. The method of claim 15 wherein the microbe is in vitro or in vivo.

18-36. (canceled)

37. A method for decreasing the growth rate of a microbe, the method comprising:
combining a microbe with an agent that binds to a polypeptide encoded by a coding sequence comprising a nucleotide sequence selected from the group consisting of SEQ ID NO: 31, 99, 109, 124, 180, 210, 215, 232, and 200.

38. The method of claim 37 wherein the microbe is in vitro or in vivo.

39-42. (canceled)

43. A method for making an H. influenzae with reduced virulence, the method comprising:
altering a coding sequence in an H. influenzae to comprise a mutation, the non-mutagenized coding sequence comprising a nucleotide sequence selected from the group consisting of SEQ ID NO:31, 99, 109, 124, 180, 210, 215, 232, and 200; and
determining if the H. influenzae comprising the mutation has reduced virulence compared to an H. influenzae that does not comprise the mutation.

44. The H. influenzae of claim 43 wherein the mutation is selected from the group consisting of a deletion mutation, an insertion mutation, a nonsense mutation, and a missense mutation.

45. An H. influenzae of claim 43.

46. A vaccine composition comprising the H. influenzae organism of claim 43.

47-54. (canceled)

55. The isolated polynucleotide of claim 1 wherein the nucleotide sequence is selected from the group consisting of the coding sequence in SEQ ID NO:31, 99, 109, 124, 180, 210, 215, 232, 200, and the complements thereof

56. The isolated polynucleotide of claim 3 comprising a coding sequence encoding a polypeptide having an amino acid sequence selected from the group consisting of 286, 299, 301, 304, 314, 318, 322, 323, and 327.
